(19) United States
(12) Patent Application Publication
(10) Pub. No.: US 2012/0039806 A1
(43) Pub. Date: Feb. 16, 2012

(54) Compounds and Methods for Modulating an Immune Response

(76) Inventors: Mireille Hanna Lahoud, Victoria (AU); Irina Caminschi, Victoria (AU); Jian-Guo Zhang, Victoria (AU); Mark Francis Van Delft, Victoria (AU); David Ching Siang Huang, Victoria (AU); Nicos Anthony NIcola, Victoria (AU); Alan Cowman, Victoria (AU); Mark Dexter Wright, Victoria (AU)

(21) Appl. No.: 13/203,682

(22) PCT Filed: Mar. 22, 2010
(86) PCT No.: PCT/AU10/00325

§ 371 Date: Nov. 1, 2011

Related U.S. Application Data
(60) Provisional application No. 61/162,616, filed on Mar. 23, 2009.

(51) Int. Cl. A61K 49/00; A61K 9/48; A61K 39/00; A61K 47/00; G01N 33/567; C12N 5/10; C12N 1/21; C12N 1/19; C12N 15/63; A61P 37/00; A61P 35/00; A61K 38/17; A61K 31/7088; C07K 14/00; C07K 16/00; A61P 37/08; A61P 31/00; A61P 33/02; A61P 29/00; A61K 9/127

(52) U.S. Cl. 424/9.1; 424/450; 424/451; 424/184.1; 424/185.1; 424/278.1; 435/7.2; 435/325; 435/348; 435/375; 435/419; 435/252.3; 435/254.2; 435/320.1; 514/4.4; 514/19.3; 514/21.2; 514/44 R; 514/44 A; 530/350; 530/387.3; 530/387.9; 530/391.3; 530/391.7; 536/23.4

(57) ABSTRACT

The present invention relates to the identification of proteins which bind the dendritic cell marker known as Clec9A. The present invention provides new compounds for targeting therapeutic agents such as antigens to dendritic cells. Also provided are methods of modulating a humoral and/or T cell mediated immune response to the antigen, methods of delivery of a cytotoxic agent to dendritic cells thereof involved in diseased states, methods of modulating the uptake and/or clearance of cells with a disrupted cell membrane, cells infected with a pathogen, dying cells or dead cells, or a portion thereof, and methods of modulating antigen recognition, processing and/or presentation, as well as immune responses to material derived from cells with a disrupted cell membrane, cells infected with a pathogen, dying cells or dead cells, or a portion thereof.

### FIELD OF THE INVENTION

[0001] The present invention relates to the identification of proteins which bind the dendritic cell marker known as Clec9A. The present invention provides new compounds for targeting therapeutic agents such as antigens to dendritic cells. Also provided are methods of modulating a humoral and/or T cell mediated immune response to the antigen, methods of delivery of a cytotoxic agent to dendritic cells thereof involved in diseased states, methods of modulating the uptake and/or clearance of cells with a disrupted cell membrane, cells infected with a pathogen, dying cells or dead cells, or a portion thereof, and methods of modulating antigen recognition, processing and/or presentation, as well as immune responses to material derived from cells with a disrupted cell membrane, cells infected with a pathogen, dying cells or dead cells, or a portion thereof.

### BACKGROUND OF THE INVENTION

### Dendritic Cell Biology

[0002] Dendritic cells (DC) are found in most tissues, where they continuously sample the antigenic environment and use several types of receptors to monitor for invading pathogens. In steady state, and at an increased rate upon detection of pathogens, sentinel DC in non-lymphoid tissues migrate to the lymphoid organs where they present to T cells the Ag they have collected and processed. The phenotype acquired by the T cell depends on the context in which the DC presents its Ag. If the Ag is an innocuous self-component, DC may induce various forms of T cell unresponsiveness (tolerance) (Kenna et al., 2008). However, if the Ag is derived from a pathogen, or damaged self, DC receive danger signals, become activated and the T cells are then stimulated to become effectors, necessary to provide protective immunity (Heath and Villadangos, 2005). Moreover, DC can instruct effector T cells to acquire distinct abilities (migratory properties, cytokine secretion) tailored to fighting particular pathogens. The information required to tailor immunity is determined by the DC-pathogen interaction and is communicated by the DC to T cells via secreted cytokines or membrane proteins.

### DC Heterogeneity

[0003] The DC network is composed of distinct DC subtypes (Shortman and Naik, 2007). DC can be broadly classified into plasmacytoid pre-DC (pDC) and conventional DC (cDC). pDC secrete high levels of IFNα upon stimulation, and only develop DC form after activation (Hochrein et al., 2001; O'Keeffe et al., 2002). cDC have immediate DC form and Ag presentation function, and may be divided into “lymphoid tissue resident” DC and classical “migratory” DC which arrive in lymph nodes (LN) via the lymph. Lymphoid tissue resident DC in mice may in turn be divided into the CD8⁺ and CD8⁻ subsets (Belz et al., 2004; Lahoud et al., 2006; Henri et al., 2001). In addition, inflammatory DC develop from monocytes as a consequence of infection or inflammation (Shortman and Naik, 2007). Importantly, DC subtypes share many functions (uptake, processing and presentation of Ag to activate naïve T cells), but also exhibit subset-specific roles. These include differential expression of Toll-like receptors, production of particular chemokines, IL-12 secretion, restricted primarily to CD8⁺DC which directs T cells to a Th1 cytokine profile and cross-presentation of exogenous Ag via MHC I, mainly restricted to CD8⁺DC, which allows these DC to be major presenters of viral Ag to the CD8⁺ T cells, allowing them to develop cytotoxic function.

[0004] Humans most likely contain equivalents of these DC subsets, as mouse and human DC extracted from the same tissue (blood or thymus) are similar (Vandenabeele et al., 2001; O'Keeffe et al., 2003). However, human equivalents of most murine lymphoid organ resident DC subsets remain unknown, due to differences in markers between species (CD8α is not on human DC) and the difficulty of obtaining human lymphoid organs for detailed analyses. Definition of DC subset-specific markers conserved between mice and humans is therefore a major challenge.

### Cell Death and the Immune Response

[0005] Apoptosis occurs continuously during development and within the immune system. It is characterised by convoluting of cell membranes, condensing of nuclei and fragmenting of cells into apoptotic bodies that still retain their cellular contents; these are usually engulfed by “phagocytes” without release of cellular contents. In contrast, necrosis, which may occur during injury or infection, is characterised by cell membrane rupturing and cellular content release. However, cellular contents may also be released from apoptotic cells if they are not rapidly engulfed (secondary necrosis). Rapid clearance of apoptotic cells generally promotes an immunosuppressive environment that avoids inflammatory responses to self-Ag, whereas necrosis or failure of apoptotic cell clearance promotes immune responses to self-Ag (Hume, 2008; Nagata, 2007; Peng et al., 2007). Thus, early recognition of apoptotic cells is essential for homeostatic maintenance and prevention of autoimmunity.

### Recognition of Dead/Dying Cells

[0006] Phagocytes, including DC, sense many molecular changes in dying cells. Molecules normally within the cell may be secreted or presented on the cell surface of apoptotic cells, or finally exposed when the cell membrane is disrupted. Existing molecules may be modified or new molecules produced in response to stress. An example of such a molecule is phosphotidylserine (PS) which is a lipid that is translocated from the inside to the outside of the cell membrane early in the apoptotic process, and serves as an “eat me” signal. Many molecules on phagocytes mediate the recognition of PS including CD36, MFG-E8 and Tim4.

[0007] Another example of molecules which are produced in response to stress are heat shock or stress proteins (Hsp), which serve as molecular chaperones in intact cells (Binder et al., 2004), and may provide signals to DC from stressed/dying cells (Delneste, 2004). Proposed Hsp receptors on phagocytes and DC include CD91, Lox1/Clec8, CD40, TLR2, TLR4, CD36. Furthermore, immunisation with Hsp-chaperoned peptides is extremely effective, requiring only pg amounts of protein.

### Recognition and Uptake of Dead Cells by DC

[0008] Both macrophages and DC can take up dead or dying cells. Many of the scavenger receptors on macrophages are also found on DC. However, only DC have the capacity to process cell components and then effectively present them to, and activate, naive T cells. While the uptake of apoptotic cells by DC in the absence of additional pathogen signals generally induces tolerance (Steinman et al., 2000), uptake of necrotic cells induces DC maturation and stimulation of immune response (Sauter et al., 2000). Thus differential recognition of these states by receptors on DC is crucial to the immune system. Murine CD8⁺ cDC are more efficient than CD8⁻ DC at both uptake of apoptotic/dead cells and subsequent presentation of cell bound and viral Ag to T cells, particularly the “cross-presentation” on MHC I to CD8 T cells (Belz et al., 2004; Schnorrer et al., 2006; Belz et al., 2005; Iyoda et al., 2002). Human pDC have been claimed to be effective at uptake of dying cells (Hoeffel et al., 2007). Thus, the selective expression of dead cell uptake receptors by DC subtypes is an important issue.

### Clec9A

[0009] Clec9A (also referred to by the present inventors as 5B6) is one of a family of C-type lectin-like molecules. In humans, Clec9A expression is restricted to a subset of dendritic cells which appear to be the human equivalent of mouse CD8+ dendritic cells. Clec9A can be targeted to modulate the immune response (Caminschi et al., 2008). To date, antibodies which bind Clec9A, as well as soluble forms of Clec9A, have been determined to be useful for targeting antigens to dendritic cells. However, natural ligands of Clec9A had not been identified before now.

### SUMMARY OF THE INVENTION

[0010] The present inventors have identified ligands of Clec9A. These ligands can be used to target therapeutic agents to Clec9A expressing cells such as dendritic cells.

[0011] In a first aspect, the present invention provides a compound comprising a polypeptide conjugated to a therapeutic agent, wherein the polypeptide comprises

[0012] i) an amino acid sequence as provided in any one of SEQ ID NO's 48 to 80;

[0013] ii) an amino acid sequence which is at least 50% identical to any one or more of SEQ ID NO's 48 to 80; and/or

[0014] iii) a biologically active fragment of i) or ii), and wherein the polypeptide of the compound binds a second polypeptide comprising

[0015] a) an amino acid sequence as provided in any one of SEQ ID NO's 1 to 8; and/or

[0016] b) an amino acid sequence which is at least 50% identical to any one or more of SEQ ID NO's 1 to 8.

[0017] Examples of suitable therapeutic agents include, but are not limited to, an antigen, a cytotoxic agent, a drug and/or pharmacological agent.

[0018] The antigen can be any molecule that induces an immune response in an animal. Examples include, but are not limited to, a cancer antigen, a self antigen, an allergen, and/or an antigen from a pathogenic and/or infectious organism.

[0019] In an embodiment, the antigen from a pathogenic and/or infectious organism can be from, but not limited to, Plasmodium falciparum or Plasmodium vivax.

[0020] In another aspect, the present invention provides a compound comprising a polypeptide conjugated to a detectable label, wherein the polypeptide comprises

[0021] i) an amino acid sequence as provided in any one of SEQ ID NO's 48 to 80;

[0022] ii) an amino acid sequence which is at least 50% identical to any one or more of SEQ ID NO's 48 to 80; and/or

[0023] iii) a biologically active fragment of i) or ii), and wherein the polypeptide of the compound binds a second polypeptide comprising

[0024] a) an amino acid sequence as provided in any one of SEQ ID NO's 1 to 8; and/or

[0025] b) an amino acid sequence which is at least 50% identical to any one or more of SEQ ID NO's 1 to 8.

[0026] In another aspect, the present invention provides a compound that binds a polypeptide which comprises:

[0027] i) an amino acid sequence as provided in any one of SEQ ID NO's 48 to 80;

[0028] ii) an amino acid sequence which is at least 50% identical to any one or more of SEQ ID NO's 48 to 80; and/or

[0029] iii) a biologically active fragment of i) or ii).

[0030] In a preferred embodiment of the above aspect, the compound is not an antibody which binds Clec9A, Clec9A per se or a fragment of Clec9A which binds

[0031] Clec9A such as a soluble fragment.

[0032] In a preferred embodiment, the compound is a polypeptide.

[0033] In another preferred embodiment of the above aspect, the compound is an antibody or antigenic binding fragment thereof. Examples of antibodies or antigenic binding fragment thereof include, but are not limited to, a monoclonal antibody, humanized antibody, single chain antibody, diabody, triabody, or tetrabody.

[0034] In a further preferred embodiment, the compound of the above aspect is conjugated to a therapeutic agent. Examples of such therapeutic agents are described above in relation to the first aspect.

[0035] In a further preferred embodiment, the compound of the above aspect is detectably labelled.

[0036] In a further aspect, the present invention provides a composition comprising a compound of the invention and a pharmaceutically acceptable carrier:

[0037] In an embodiment, the composition further comprises an adjuvant.

[0038] In another embodiment, the compound is encapsulated in, or exposed on the surface of, a liposome.

[0039] In a further aspect, the present invention provides a method of modulating an immune response in a subject, the method comprising administering to the subject a compound of the invention and/or a composition of the invention.

[0040] In an embodiment, the immune response to an antigen is induced and/or enhanced.

[0041] In a particularly preferred embodiment, the immune response is modulated by enhancing a helper T cell response.

[0042] In a further preferred embodiment, the immune response is modulated by the activation of CD4+ and/or CD8+ T cells.

[0043] In another particularly preferred embodiment, the immune response is modulated by enhancing B cell antibody production. Examples of antibodies produced include, but are not necessarily limited to, IgG1, IgG2b, IgG2c, IgG3, IgG4, IgM, IgA1, IgA2, IgE and/or IgD antibody isotypes.

[0044] In a further preferred embodiment, the immune response is modulated by generating a memory response.

[0045] In a particularly preferred embodiment, the subject is administered with a compound comprising the antigen.

[0046] In another embodiment, an immune response to a self antigen or allergen is reduced. In this embodiment, it is preferred that the immune response is modulated by suppressing a T cell response and/or a B cell antibody response.

[0047] In another aspect, the present invention provides a method of modulating an immune response to an antigen in a subject, the method comprising exposing dendritic cells or precursors thereof in vitro to a compound of the invention, and/or a composition of the invention, and administering said cells to the subject.

[0048] In an embodiment, the cells have been isolated from the subject.

[0049] Preferably, a humoral and/or T cell mediated response is modulated.

[0050] In a further embodiment, naïve CD8+ T cell activation, and/or naïve CD4+ T cell activation, is modulated.

[0051] In yet another embodiment, the humoral response comprises the production of IgG1, IgG2b, IgG2c, IgG3, IgG4, IgM, IgA1, IgA2, IgE, and/or IgD antibody isotypes. In another embodiment, the humoral response at least comprises the production of IgG1 antibody isotype.

[0052] Preferably, the dendritic cell is an animal dendritic cell or precursor of an animal dendritic cell. More preferably, the dendritic cell is a human dendritic cell. Even more preferably, the human dendritic cell is Necl-2+, HLA DR+ and/or BDCA-3+.

[0053] In yet another aspect, the present invention provides a method of treating and/or preventing a disease involving dendritic cells or precursors thereof, the method comprising administering to the subject a compound of the invention, and/or a composition of the invention.

[0054] Preferably, the method comprises administering a compound comprising the cytotoxic agent, drug and/or pharmacological agent.

[0055] In a further aspect, the present invention provides a method of treating and/or preventing a disease involving dendritic cells or precursors thereof, the method comprising administering to the subject an isolated polynucleotide and/or construct encoding said polynucleotide which, when present in a cell of the subject, modulates the level of activity of a polypeptide which comprises:

[0056] i) an amino acid sequence as provided in any one of SEQ ID NO's 48 to 80; and/or

[0057] ii) an amino acid sequence which is at least 50% identical to any one or more of SEQ ID NO's 48 to 80,

in the cell when compared to a cell that lacks said polynucleotide.

[0058] In an embodiment, the polynucleotide down-regulates the level of activity of the polypeptide in the cell. Examples of such polynucleotides include, but are not limited to, an antisense polynucleotide, a sense polynucleotide, a catalytic polynucleotide, a microRNA, and a double stranded RNA.

[0059] In an alternate embodiment, the polynucleotide up-regulates the level of activity of the polypeptide. For example, the polynucleotide encodes a polypeptide which comprises an amino acid sequence as provided in any one of SEQ ID NO's 48 to 80.

[0060] Examples of diseases involving dendritic cells or precursors thereof include, but are not limited to, cancer, an infection, an autoimmune disease or an allergy.

[0061] In an embodiment, the autoimmune disease is lupus erythematosus.

[0062] In another embodiment, the infection is a Plasmodium sp., such as Plasmodium falciparum or Plasmodium vivax, infection.

[0063] In another aspect, the present invention provides a method of modulating the uptake and/or clearance of cells with a disrupted cell membrane, cells infected with a pathogen, dying cells or dead cells, or a portion thereof, in a subject, the method comprising administering

[0064] i) a polypeptide comprising
[0065] a) an amino acid sequence as provided in any one of SEQ ID NO's 48 to 80;
[0066] b) an amino acid sequence which is at least 50% identical to any one or more of SEQ ID NO's 48 to 80; and/or
[0067] c) a biologically active fragment of a) or b),

[0068] ii) a compound of the invention, and/or

[0069] iii) a composition of the invention.

[0070] In another aspect, the present invention provides a method of modulating the antigen recognition, processing and/or presentation of material derived from cells with a disrupted cell membrane, cells infected with a pathogen, dying cells or dead cells, or a portion thereof, or surrounding cells, in a subject, the method comprising administering

[0071] i) a polypeptide comprising
[0072] a) an amino acid sequence as provided in any one of SEQ ID NO's 48 to 80;
[0073] b) an amino acid sequence which is at least 50% identical to any one or more of SEQ ID NO's 48 to 80; and/or
[0074] c) a biologically active fragment of a) or b),

[0075] ii) a compound of the invention, and/or

[0076] iii) a composition of the invention.

[0077] In a further aspect, the present invention provides a method of modulating an immune response to material derived from cells with a disrupted cell membrane, cells infected with a pathogen, dying cells or dead cells, or a portion thereof, or surrounding cells, in a subject, the method comprising administering a

[0078] i) a polypeptide comprising
[0079] a) an amino acid sequence as, provided in any one of SEQ ID NO's 48 to 80;
[0080] b) an amino acid sequence which is at least 50% identical to any one or more of SEQ ID NO's 48 to 80; and/or
[0081] c) a biologically active fragment of a) or b),

[0082] ii) a compound of the invention, and/or

[0083] iii) a composition of the invention.

[0084] In a further aspect, the present invention provides a method of modulating the uptake and/or clearance of cells with a disrupted cell membrane, cells infected with a pathogen, dying cells or dead cells, or a portion thereof, in a subject, the method comprising administering a compound which modulates the production of a polypeptide which comprises:

[0085] i) an amino acid sequence as provided in any one of SEQ ID NO's 48 to 80;

[0086] ii) an amino acid sequence which is at least 50% identical to any one or more of SEQ ID NO's 48 to 80; and/or

[0087] iii) a biologically active fragment of i) or ii).

[0088] In another aspect, the present invention provides a method of modulating the antigen recognition, processing and/or presentation of material derived from cells with a disrupted cell membrane, cells infected with a pathogen, dying cells or dead cells, or a portion thereof, or surrounding cells, in a subject, the method comprising administering a compound which modulates the production of a polypeptide which comprises:

[0089] i) an amino acid sequence as provided in any one of SEQ ID NO's 48 to 80;

[0090] ii) an amino acid sequence which is at least 50% identical to any one or more of SEQ ID NO's 48 to 80; and/or

[0091] iii) a biologically active fragment of i) or ii).

[0092] In a further aspect, the present invention provides a method of modulating an immune response to material derived from cells with a disrupted cell membrane, cells infected with a pathogen, dying cells or dead cells, or a portion thereof, or surrounding cells, in a subject, the method comprising administering a compound which modulates the production of a polypeptide which comprises:

[0093] i) an amino acid sequence as provided in any one of SEQ ID NO's 48 to 80;

[0094] ii) an amino acid sequence which is at least 50% identical to any one or more of SEQ ID NO's 48 to 80; and/or

[0095] iii) a biologically active fragment of i) or ii).

[0096] Preferably, the compound of the previous three aspects is a polynucleotide. Preferably, the polynucleotide is operably linked to a promoter capable of directing expression of the polynucleotide in a cell of an animal.

[0097] In an embodiment, the polynucleotide down-regulates mRNA levels from a gene encoding the polypeptide. Examples include, but are not limited to, an antisense polynucleotide, a sense polynucleotide, a catalytic polynucleotide, a microRNA, and a double stranded RNA.

[0098] In one embodiment, the polynucleotide is an antisense polynucleotide which hybridises under physiological conditions to a polynucleotide comprising any one or more of the sequence of nucleotides provided as SEQ ID NO's 81 to 113.

[0099] In another embodiment, the polynucleotide is a catalytic polynucleotide capable of cleaving a polynucleotide comprising any one or more of the sequence of nucleotides provided as SEQ ID NO's 81 to 113.

[0100] In a further embodiment, the polynucleotide is a double stranded RNA (dsRNA) molecule comprising an oligonucleotide which comprises at least 19 contiguous nucleotides of any one or more of the sequence of nucleotides provided as SEQ ID NO's 81 to 113, wherein the portion of the molecule that is double stranded is at least 19 basepairs in length and comprise's said oligonucleotide. In an embodiment, the polynucleotide is expressed from a single promoter, wherein the strands of the double stranded portion are linked by a single stranded portion.

[0101] In an alternate embodiment, the polynucleotide up-regulates mRNA levels from a gene encoding the polypeptide.

[0102] In one embodiment, the uptake and/or clearance of cells with a disrupted cell membrane, cells infected with a pathogen, dying cells or dead cells, or a portion thereof, is increased. In an alternate embodiment, the uptake and/or clearance of cells with a disrupted cell membrane, cells infected with a pathogen, dying cells or dead cells, or a portion thereof, is decreased.

[0103] In another embodiment, antigen recognition, processing and/or presentation of material derived from cells with a disrupted cell membrane, cells infected with a pathogen, dying cells, or dead cells, or a portion thereof, or surrounding cells, is increased. In an alternate embodiment, antigen recognition, processing and/or presentation of material derived from cells with a disrupted cell membrane, cells infected with a pathogen, dying cells, or dead cells, or a portion thereof, or surrounding cells, is decreased.

[0104] In another embodiment, the immune response to material derived from cells with a disrupted cell membrane, cells infected with a pathogen, dying cells or dead cells, or a portion thereof, or surrounding cells, is increased. In an alternate embodiment, the immune responses to material derived from cells with a disrupted cell membrane, cells infected with a pathogen, dying cells or dead cells, or a portion thereof, or surrounding cells, is decreased.

[0105] In a further preferred embodiment, the subject is suffering from a disease associated with cells with a disrupted cell membrane, cells infected with a pathogen, dying cells or dead cells, or a portion thereof. Examples of such diseases include, but are not limited to, graft versus host disease (GVHD), an autoimmune disease, an infection, a neurodegenerative disease, systemic inflammatory reaction syndrome (SIRS), cancer and injury.

[0106] Also provided is the use of a compound of the invention, and/or a composition of the invention for the manufacture of a medicament for modulating an immune response in a subject.

[0107] Furthermore, provided is the use of dendritic cells or precursors thereof exposed in vitro to a compound of the invention and/or a composition of the invention for the manufacture of a medicament for modulating an immune response to an antigen in a subject.

[0108] Also provided is the use of a compound of the invention and/or a composition of the invention for the manufacture of a medicament for treating and/or preventing a disease involving dendritic cells or precursors thereof in a subject.

[0109] In another aspect, provided is the use of

[0110] i) a polypeptide comprising
[0111] a) an amino acid sequence as provided in any one of SEQ ID NO's 48 to 80;
[0112] b) an amino acid sequence which is at least 50% identical to any one or more of SEQ ID NO's 48 to 80; and/or
[0113] c) a biologically active fragment of a) or b),

[0114] ii) a compound of the invention, and/or

[0115] iii) a composition of the invention, for the manufacture of a medicament for modulating the uptake and/or clearance of cells with a disrupted cell membrane, cells infected with a pathogen, dying cells or dead cells, or a portion thereof, in a subject.

[0116] In another aspect, provided is the use of

[0117] i) a polypeptide comprising
[0118] a) an amino acid sequence as provided in any one of SEQ ID NO's 48 to 80;
[0119] b) an amino acid sequence which is at least 50% identical to any one or more of SEQ ID NO's 48 to 80; and/or
[0120] c) a biologically active fragment of a) or b),

[0121] ii) a compound of the invention, and/or

[0122] iii) a composition of the invention,

for the manufacture of a medicament for modulating the antigen recognition, processing and/or presentation of material derived from cells with a disrupted cell membrane, cells infected with a pathogen, dying cells or dead cells, or a portion thereof, or surrounding cells, in a subject.

[0123] In another aspect, provided is the use of

[0124] i) a polypeptide comprising
[0125] a) an amino acid sequence as provided in any one of SEQ ID NO's 48 to 80;
[0126] b) an amino acid sequence which is at least 50% identical to any one or more of SEQ ID NO's 48 to 80; and/or
[0127] c) a biologically active fragment of a) or b),

[0128] ii) a compound of the invention, and/or

[0129] iii) a composition of the invention,

for the manufacture of a medicament for modulating an immune response to material derived from cells with a disrupted cell membrane, cells infected with a pathogen, dying cells or dead cells, or a portion thereof, or surrounding cells, in a subject.

[0130] In another aspect, provided is the use of a compound which modulates the production of a polypeptide which comprises:

[0131] i) an amino acid sequence as provided in any one of SEQ ID NO's 48 to 80;

[0132] ii) an amino acid sequence which is at least 50% identical to any one or more of SEQ ID NO's 48 to 80; and/or

[0133] iii) a biologically active fragment of i) or ii),

for the manufacture of a medicament for modulating the uptake and/or clearance of cells with a disrupted cell membrane, cells infected with a pathogen, dying cells or dead cells, or a portion thereof, in a subject.

[0134] In another aspect, provided is the use of a compound which modulates the production of a polypeptide which comprises:

[0135] i) an amino acid sequence as provided in any one of SEQ ID NO's 48 to 80;

[0136] ii) an amino acid sequence which is at least 50% identical to any one or more of SEQ ID NO's 48 to 80; and/or

[0137] iii) a biologically active fragment of i) or ii), for the manufacture of a medicament for modulating the antigen recognition, processing and/or presentation of material derived from cells with a disrupted cell membrane, cells infected with a pathogen, dying cells or dead cells, or a portion thereof, or surrounding cells, in a subject.

[0138] In another aspect, provided is the use of a compound which modulates the production of a polypeptide which comprises:

[0139] i) an amino acid sequence as provided in any one of SEQ ID NO's 48 to 80;

[0140] ii) an amino acid sequence which is at least 50% identical to any one or more of SEQ ID NO's 48 to 80; and/or

[0141] iii) a biologically active fragment of i) or ii),

for the manufacture of a medicament for modulating an immune response to material derived from cells with a disrupted cell membrane, cells infected with a pathogen, dying cells or dead cells, or a portion thereof, or surrounding cells, in a subject.

[0142] In a further aspect, the present invention provides a method of diagnosing, prognosing and/or monitoring the status of a disease associated with cells with a disrupted cell membrane, cells infected with a pathogen, dying cells or dead cells, the method comprising

[0143] i) contacting a cell with a compound that binds a polypeptide comprising
[0144] a) an amino acid sequence as provided in any one of SEQ ID NO's 48 to 80;
[0145] b) an amino acid sequence which is at least 50% identical to any one or more of SEQ ID NO's 48 to 80; and/or
[0146] c) a biologically active fragment of a) or b), and

[0147] ii) determining whether the polypeptide is present or absent,

wherein the presence of the polypeptide provides a diagnosis, prognosis and/or status of the disease.

[0148] In a preferred embodiment of the above aspect, the compound is not an antibody which binds Clec9A, Clec9A per se or a fragment of Clec9A which binds Clec9A such as a soluble fragment.

[0149] In an embodiment, the compound is an antibody or antigenic binding fragment thereof. Examples include, but are not limited to, a monoclonal antibody, humanized antibody, single chain antibody, diabody, triabody, or tetrabody.

[0150] In a preferred embodiment, the compound is detectably labelled.

[0151] In an embodiment, the method is performed in vivo on a subject. In an alternate embodiment, the method is performed in vitro on a sample obtained from a subject.

[0152] As noted above, examples of diseases associated with cells with a disrupted cell membrane, cells infected with a pathogen, dying cells or dead cells include, but are not limited to, graft versus host disease (GVHD), an autoimmune disease, an infection, a neurodegenerative disease, systemic inflammatory reaction syndrome (SIRS), cancer and injury.

[0153] In a further aspect, the present invention provides a method of monitoring the effectiveness of a therapy for killing a cell, the method comprising;

[0154] i) exposing a cell to the therapy, and

[0155] ii) detecting a cell with a disrupted cell membrane, dying cell or a dead cell, or a portion thereof, using a method of the invention,

wherein the presence of a cell with a disrupted cell membrane, a dying cell or a dead cell indicates that the therapy is effective,

[0156] In an embodiment, the cell in step i) is in vivo. In an alternate embodiment, the cell in step i) is in vitro.

[0157] Preferably, the therapy is administered to a subject. In an embodiment, the subject is suffering from a disease associated with cells with a disrupted cell membrane, cells infected with a pathogen, dying cells or dead cells. In a preferred embodiment, the subject has cancer or an infection.

[0158] In a further embodiment, step ii) is performed on a sample obtained from a subject.

[0159] The therapy can be any type of procedure. Examples include, but are not limited to, drug therapy or radiotherapy.

[0160] In a further aspect, the present invention provides a method of distinguishing between an early stage apoptotic cell and a late stage apoptotic cell, necrotic cell or dead cell, the method comprising

[0161] i) contacting a cell with a compound that binds
[0162] a) an amino acid sequence as provided in any one of SEQ ID NO's 48 to 80;
[0163] b) an amino acid sequence which is at least 50% identical to any one or more of SEQ ID NO's 48 to 80; and/or
[0164] c) a biologically active fragment of a) or b), and

[0165] ii) determining whether binding of the compound to the polypeptide is present or absent,

wherein the compound binding to the polypeptide indicates that the cell is a late stage apoptotic cell, necrotic cell or dead cell.

[0166] In a preferred embodiment of the above aspect, the compound is not an antibody which binds Clec9A, Clec9A per se or a fragment of Clec9A which binds Clec9A such as a soluble fragment.

[0167] In another aspect, the present invention provides a method of modulating an immune response to an antigen in a subject, the method comprising

[0168] i) obtaining a population of dendritic cells or precursors thereof,

[0169] ii) modulating the production and/or activity of a polypeptide which comprises:
[0170] a) an amino acid sequence as provided in any one of SEQ ID NO's 48 to 80;
[0171] b) an amino acid sequence which is at least 50% identical to any one or more of SEQ ID NO's 48 to 80; and/or
[0172] c) a biologically active fragment of a) or b),

[0173] iii) contacting the dendritic cells or precursors thereof with the antigen, and

[0174] iv) administering the dendritic cells or precursors thereof to the subject.

[0175] In a preferred embodiment of the above aspect, the activity of the polypeptide is not modulated by an antibody which binds Clec9A, Clec9A per se or a fragment of Clec9A which binds Clec9A such as a soluble fragment.

[0176] In a preferred embodiment, step iii) comprises contacting the dendritic cells or precursors thereof with a cell with a disrupted cell membrane, a cell infected with a pathogen, a dying cell, a dead cell, and/or a portion thereof, comprising said antigen.

[0177] In a further embodiment, step iii) comprises
[0178] a) obtaining a cell comprising the antigen,
[0179] b) disrupting the cell membrane of the cell, and
[0180] c) contacting the product of step b) with the dendritic cells or precursors thereof.

[0181] In another embodiment, the method further comprises, before step ii), enriching the population for cells expressing the polypeptide.

[0182] In an embodiment, steps ii) and iii) are conducted concurrently.

[0183] In an embodiment, the cell with a disrupted cell membrane, dying cell or dead cell is a cancer cell.

[0184] In another embodiment, the production and/or activity of the polypeptide is increased. In an alternate embodiment, the production and/or activity of the polypeptide is decreased.

[0185] In an embodiment, the precursor is a monocyte.

[0186] Preferably, an immune response to the antigen is increased.

[0187] In another aspect, the present invention provides a method of enriching dendritic cells, or a subset or precursors thereof, from a sample comprising;

[0188] i) contacting a sample comprising dendritic cells or precursors thereof with a compound of the invention, and

[0189] ii) isolating cells bound to the compound.

[0190] In a further aspect, the present invention provides a method of enriching dendritic cells, or a subset or precursors thereof, from a sample comprising;

[0191] i) contacting a sample comprising dendritic cells or precursors thereof with a detectably labelled first polynucleotide that hybridizes to a second polynucleotide encoding a polypeptide which comprises
[0192] a) an amino acid sequence as provided in any one of SEQ ID NO's 48 to 80; and/or
[0193] b) an amino acid sequence which is at least 50% identical to any one or more of SEQ ID NO's 48 to 80, and

[0194] ii) isolating the detectably labelled cells.

[0195] In a preferred embodiment, the cells obtained from step ii) of the two above methods' are administered to a subject. In an embodiment, the cells are administered to treat and/or prevent a disease selected from cancer, an infection, an autoimmune disease or an allergy.

[0196] The present invention also provides a method of detecting dendritic cells, or a subset or precursors thereof, in a sample comprising;

[0197] i) contacting a sample comprising dendritic cells or precursors thereof with a compound of the invention, and

[0198] ii) detecting cells bound to the compound.

[0199] In yet another aspect, the present invention provides a method of detecting dendritic cells, or a subset or precursor thereof, in a sample comprising;

[0200] i) contacting a sample comprising dendritic cells or precursors thereof with a detectably labelled first polynucleotide that hybridizes to a second polynucleotide encoding a polypeptide which comprises
[0201] a) an amino acid sequence as provided in any one of SEQ ID NO's 48 to 80; and/or
[0202] b) an amino acid sequence which is at least 50% identical to any one or more of SEQ ID NO's 48 to 80, and

[0203] ii) detecting the detectably labelled cells.

[0204] In another aspect, the present invention provides a method of detecting dendritic cells, or a subset or precursor thereof, in a subject comprising;

[0205] i) administering to the subject a compound of the invention,

[0206] ii) detecting cells bound to the compound.

[0207] In an embodiment, the compound is detectably labelled. However, as the skilled addressee will appreciate other procedures could be used, for example, using a detectably labelled secondary antibody that binds the compound.

[0208] In yet another aspect, the present invention provides a method of detecting dendritic cells, or a subset or precursor thereof, in a subject comprising;

[0209] i) administering to the subject a detectably labelled first polynucleotide that hybridizes to a second polynucleotide encoding a polypeptide which comprises
[0210] a) an amino acid sequence as provided in any one of SEQ ID NO's 48 to 80; and/or
[0211] b) an amino acid sequence which is at least 50% identical to any one or more of SEQ ID NO's 48 to 80, and,

[0212] ii) detecting the detectably labelled cells.

[0213] In a preferred embodiment, the dendritic cells express one or more of the following markers, CD8, CD24, Necl-2, CD11c, HLADR and BDCA3.

[0214] Preferably, the dendritic cells are human dendritic cells that express one or more of the following markers, Necl-2, HLADR and BDCA3.

[0215] In an alternative embodiment, the dendritic cells are murine dendritic cells that express one or more of the following markers, CD24, Necl-2, CD11c and CD8.

[0216] Preferably, the precursor dendritic cells are intermediate or late precursor dendritic cells which are capable of differentiating into dendritic cells in culture and/or on transfer into irradiated recipients.

[0217] In another aspect, the present invention provides a method of detecting a cell with a disrupted cell membrane, a cell infected with a pathogen, a dying cell or a dead cell, the method comprising

[0218] i) contacting a cell with a compound that binds a polypeptide comprising
[0219] a) an amino acid sequence as provided in any one of SEQ ID NO's 48 to 80;
[0220] b) an amino acid sequence which is at least 50% identical to any one or more of SEQ ID NO's 48 to 80; and/or
[0221] c) a biologically active fragment of a) or b), and

[0222] ii) determining whether binding of the compound to the polypeptide is present or absent,

wherein the compound binding to the polypeptide indicates that the cell has a disrupted cell membrane, is infected with a pathogen, is dying or is dead.

[0223] In a preferred embodiment of the above aspect, the compound is not an antibody which binds Clec9A, Clec9A per se or a fragment of Clec9A which binds Clec9A such as a soluble fragment.

[0224] Also provided is an isolated and/or exogenous polynucleotide encoding a compound of the invention, wherein the compound is a polypeptide.

[0225] In an embodiment, the polynucleotide comprises

[0226] i) a nucleotide sequence as provided in any one of SEQ ID NO's 81 to 113;

[0227] ii) a nucleotide sequence which is at least 50% identical to any one or more of SEQ ID NO's 81 to 113; and/or

[0228] iii) a nucleotide sequence which hybridizes to i) and/or ii), or a complement thereof.

[0229] In another aspect, the present invention provides an isolated polynucleotide which, when present in a cell of a subject, modulates the level of activity of a polypeptide in the cell when compared to a cell that lacks said polynucleotide, wherein the polypeptide comprises

[0230] i) an amino acid sequence as provided in any one of SEQ ID NO's 48 to 80;

[0231] ii) an amino acid sequence which is at least 50% identical to any one or more of SEQ ID NO's 48 to 80; and/or

[0232] iii) a biologically active fragment of i) or ii).

[0233] In an embodiment, the polynucleotide is operably linked to a promoter capable of directing expression of the polynucleotide in a cell of an animal.

[0234] In a preferred embodiment, the polynucleotide down-regulates mRNA levels from a gene encoding the polypeptide. Examples of such polynucleotides include, but are not limited to, an antisense polynucleotide, a sense polynucleotide, a catalytic polynucleotide, a microRNA and a double stranded RNA (dsRNA).

[0235] In an embodiment, the antisense polynucleotide hybridises under physiological conditions to a polynucleotide comprising any one or more of the sequence of nucleotides provided as SEQ ID NO's 81 to 113.

[0236] In another embodiment, the catalytic polynucleotide is capable of cleaving a polynucleotide comprising any one or more of the sequence of nucleotides provided as SEQ ID NO's 81 to 113.

[0237] In a further embodiment, the dsRNA molecule comprises an oligonucleotide which comprises at least 19 contiguous nucleotides of any one or more of the sequence of nucleotides provided as SEQ ID NO's 81 to 113 where T is replaced with a U, wherein the portion of the molecule that is double stranded is at least 19 basepairs in length and comprises said oligonucleotide.

[0238] In yet a further embodiment, the dsRNA molecule is expressed from a single promoter, wherein the strands of the double stranded portion are linked by a single stranded portion.

[0239] In an alternate embodiment, the polynucleotide up-regulates mRNA levels from a gene encoding the polypeptide. For example, the polynucleotide encodes the polypeptide.

[0240] Also provided is a vector comprising at least one polynucleotide of the invention. Preferably, the vector is an expression vector.

[0241] In a further aspect, the present invention provides a host cell comprising at least one polynucleotide of the invention, and/or at least one vector of the invention. The cell can be any cell type such as, but not limited to, a bacterial, yeast, animal, insect or plant cell.

[0242] Also provided are transgenic non-human organisms, such as transgenic plants, comprising at least one cell of the invention.

[0243] In a further aspect, the present invention provides an enriched population of dendritic cells and/or precursors thereof, obtained by a method of the invention.

[0244] In another aspect, the present invention provides an expanded dendritic cell population, and/or precursors thereof, obtained by culturing an enriched population of dendritic cells and/or precursors thereof of the invention.

[0245] In a further aspect, provided is a composition comprising a polynucleotide of the invention, a vector of the invention, a host cell of the invention, and/or a cell population of the invention, and a pharmaceutically acceptable carrier.

[0246] In a further aspect, provided is a kit comprising a compound of the invention, a polynucleotide of the invention, a vector of the invention, a host cell of the invention, a cell population of the invention and/or a composition of the invention.

[0247] As will be apparent, preferred features and characteristics of one aspect of the invention are applicable to many other aspects of the invention.

[0248] Throughout this specification the word “comprise”, or variations such as “comprises” or “comprising”, will be understood to imply the inclusion of a stated element, integer or step, or group of elements, integers or steps, but not the exclusion of any other element, integer or step, or group of elements, integers or steps.

[0249] The invention is hereinafter described by way of the following non-limiting Examples and with reference to the accompanying figures.

### BRIEF DESCRIPTION OF THE ACCOMPANYING DRAWINGS

[0250] FIG. 1. The genomic structure and predicted protein structure encoded by the mouse (m) and human (h) 5B6 genes. The full-length cDNA encoding (A) mouse and (B) human 5B6. (C) Protein sequence alignment of the predicted protein sequence encoded by mouse and human 5B6. Sequence identity is highlighted in dark grey, similarity is shown in a light grey. Arrowheads denote exon boundaries. (D) Gene structures of mouse and human 5B6, determined by alignment of the cDNA to the genomic sequence databases of the C57BL/6J mouse (UCSC assembly February 2006) and human databases (UCSC assembly March 2006) respectively, are represented schematically. Exons encoding the coding region of 5B6 genes are denoted by black boxes and the size (bp) of the exons and introns are shown below. (E) A schematic representation of the mouse and human 5B6 proteins.

[0251] FIG. 2. Alignment of the CTLD of mouse and human 5B6 (Clec9A) to proteins that share sequence homology. Rat mannose binding protein A (MBP-A) is included for comparison as a classical C-type lectin domain that has functional carbohydrate recognition domains. Grey boxes indicate conserved residues, (+) indicates additional pair of cysteine residues involved in protein homodimeration, (*) marks the conserved cysteine residues that form disulfide bonds. The residues that ligate Ca²⁺ in the MBP-A are designated 1 and 2.

[0252] FIG. 3. Gene expression profiles of mouse 5B6. Real-time RT-PCR was used to study the expression profiles of the 5B6 gene relative to Gapdh in (A) lymphoid organ steady state DC including splenic cDC subsets; DN, CD4⁺ and CD8⁺, thymic cDC subsets; CD8⁻ and CD8⁺, LN cDC subsets; CD8⁻, CD8⁺, Dermal and Langerhans' cells (LC) and in thymic and splenic pDC. (B) Haemopoietic cells including thymocytes (thym), lymph node (LN) B and T cells, spleen (spl) B and T cells, NK cells, immature macrophages (im mac), mature macrophages (mat mac), splenic pDC and cDC. (C) Splenic cDC isolated from both steady state (resting) mice and after 3 hours in vivo activation with LPS and CpG.

[0253] FIG. 4. Surface expression of m5B6 (Clec9A) protein on DCs and other hemopoietic cells. (A) The DCs were purified and surface labeled by 4-color immunofluorescent staining. DCs were stained with mAb against CD11c (N418-PeCy7), CD45RA (14.8-APC), CD8 (53-6.7-APC-Cy7) and m5B6 (10B4-biotin). Splenic DCs were also stained with CD4 (GK1.5-FITC), thymic DCs with Sirpα (p84-FITC), and subcutaneous LN DCs with CD205 (NLDC-145-FITC). Splenic cDCs were divided into CD4⁺ cDCs (CD11^{hi}CD45RA⁻CD4⁺CD8⁻), DN cDCs (CD11^{hi}CD45RA⁻CD4⁻CD8⁻) and CD8⁺cDCs (CD11^{hi}CD45RA⁻CD8⁺CD4⁻); thymic cDCs were divided into CD8⁻cDCs (Sirpα^{hi}CD8^{lo}) and CD8⁺cDCs (Sirpα^{lo}CD8⁺); and LN cDCs into CD8⁻cDC (CD11c⁺CD205⁻CD8⁻), dermal cDCs (CD11c⁺CD205^{int}CD8⁻), Langerhans' cells (CD11c⁺CD205^{hi}CD8⁻) and CD8⁺cDCs (CD11c⁺CD205^{hi}CD8⁺), as described previously³¹. pDCs were identified as CD11c^{int}CD45RA⁺. Splenocytes were stained with mAb against CD3 (KT3-1.1-FITC), CD 19 (1D3-PeCy7), NK1.1 (PK136-PeCy7), CD49b (Hmα2-APC) and B cells (CD19⁺CD3⁻), T cells (CD19⁻ CD3⁺) and NK cells (NK1.1⁺CD49b⁺CD3⁻) were identified. Splenic macrophages were enriched as indicated in Materials and Methods and stained with CD11b (M1/70-Cy5) and F4/80-FITC and defined as CD11b^{hi}F4/80⁺. Bone marrow cells and splenocytes were stained with mAb against CD11b (M1/70-Cy5) and Ly6C (5075-3,6-FITC) and monocytes were defined as side-scatter^{lo}Ly6C^{hi}CD11b^{hi}. Bone marrow macrophages were Ly6C^{int}CD11b^{hi}. Cell populations were counterstained with SA-PE and analysed for m5B6 expression. The solid line represents m5B6 staining on gated cells, the dotted line represents staining of the gated cells with an isotype-matched control. (B) Enriched preparations of splenic DCs were stained with mAb against m5B6 (10B4-biotin), CD11c (N418-Quantum dot 655), CD8a (YTS-169-PercpCy5.5) and CD24 (M1/69-Alexa 633) and 120G8-FITC, then counterstained with SA-PE. pDCs (CD11c^{int}120G8⁺) and cDCs (CD11c^{hi}120G8⁻) were analysed for expression of m5B6. m5B6 expression correlated with CD8a and CD24 expression on cDCs. Most splenic pDCs expressed m5B6. (C) An enriched preparation of blood DCs was stained in parallel with the splenic DCs (B) using the same mAbs and analysed using identical gating strategies. Blood DCs do not express CD8α, but do express CD24. Similar to splenic DCs, blood DCs expressing CD24 also co-expressed 5B6 pDCs from the blood, like their splenic counterpart, expressed m5B6.

[0254] FIG. 5. Expression of 5B6 on human and macaque DC and hemopoietic cells. (A) Human and macaque peripheral blood mononuclear cells (PBMCs) were isolated and surface immunofluorescence labeled with mAb against HLADR, BDCA3, 5B6, and a PE-conjugated Lineage cocktail including CD3 (T cells), CD14 (monocytes), CD19 (B cells) and CD56 (Natural killer cells). Blood DC were gated as HLADR⁺ Lineage (PE)⁻ and further analysed for their expression of 5B6 (human and macaque) and BDCA3 (human). (B) Human PBMC were surface immunofluorescence labeled with mAb against the required surface markers and 5B6. Monocytes (CD14⁺), NK cells (NKp46⁺), T cells (CD3⁺), and B cells (CD19⁺) were gated and analysed for their expression of 5B6 (solid line). The dotted line represents staining of the gated cells with an isotype matched control.

[0255] FIG. 6. Binding of soluble 5B6 to membrane bound 5B6 on transiently transfected 293T cells. 293T cells were transiently transfected with expression constructs encoding full length untagged m5B6 (283T-m5B6), h5B6 (293T-h5B6) or no DNA (293T). Two days later, cells were harvested and surface immunofluorescence labeled using soluble FLAG-tagged m5B6, h5B6 and Cire, and binding detected using biotinylated anti-Flag mAb 9H10 and Streptavidin PE. Live cells were gated on forward scatter and propidium iodide exclusion and analysed for their surface binding of soluble 5B6 (solid line) relative to control staining with anti-Flag Ab and streptavidin-PE (dashed line).

[0256] FIG. 7. Generation of soluble recombinant ectodomains of Clec9A. (A) A schematic representation of the endogenous and recombinant soluble mClec9A proteins. The endogenous protein includes the Clec9A extracellular domains, the transmembrane (TM) and the cytoplasmic (cyto) domains. Two forms of recombinant soluble mClec9A protein were generated: mClec9A-ecto which consists of the full Clec9A ectodomain, a FLAG tag and a biotinylation consensus sequence (predicted mol wt ˜27 kDa); and mClec9A-CTLD which consists of the Clec9A-CTLD, FLAG tag and biotinylation consensus sequence (predicted mol wt ˜19.7 kDa). (B) Western blot analysis of endogenous mClec9A expression. DCs were produced from cultures of bone marrow with Flt3L (Naik et al., 2005) and DC lysates electrophoresed under non-reducing (N) and reducing (R) conditions. Blots were hybridised using anti-mClec9A Ab (24/04-10B4) and binding detected using HRP conjugated anti-rat Ig and Enhanced Chemiluminescence-Plus (Amersham). mClec9A was observed to migrate as a dimer under non-reducing conditions. (C) Western blot analysis of biotinylated recombinant soluble mClec9A protein. Biotinylated mClec9A-ecto and mClec9A-CTLD were electrophoresed under nonreducing (N) and reducing (R) conditions, and proteins detected using SA-HRP and Enhanced Chemiluminescence (Amersham). Recombinant mClec9A-ecto, like endogenous mClec9A, was observed to migrate as a dimer under nonreducing conditions and as a monomer under reducing conditions whereas mClec9A-CTLD migrated as a monomer under all conditions (B, C).

[0257] FIG. 8. Binding of Clec9A ectodomains to dead cells. (A) Thymocytes were γ-irradiated (5Gy) then cultured for 4 h or 16 h at 37° C. in RPMI-1640 containing 10% FCS, to follow the progress of apoptotic death. Samples were incubated with biotinylated mClec9A-ecto (solid line), or biotinylated Cire-ecto as a background control (dashed line) and binding detected using SA-PE. Thymocytes were stained with Annexin V-FITC, analysed by flow cytometry, and gated as Annexin V⁻ (viable) cells or Annexin V⁺(apoptotic) for analysis of Clec9A binding. At 4 h 41% of the Annexin V⁺ cells were PI⁺; at 16 h 90% of the Annexin V⁺ cells were PI⁺. The backgrounds observed using biotinylated Cire-ecto were similar to those observed with second stage reagents alone. (B) MEFs overexpressing Noxa to inactivate Mcl-1 (van Delft et al., 2006) were grown to approximately 80% confluence then induced to undergo apoptosis by treatment with 2.5 μM ABT-737 for 16 h. Control untreated MEFs (viable) and ABT-737 treated MEFs (late apoptotic) were harvested and incubated with mClec9A-ecto (solid line), hCLEC9A-ecto (solid line), or Cire-ecto (background control, dashed line). Binding was detected using biotinylated anti-FLAG mAb, SA-PE and flow cytometry. 90% of the untreated MEFs were viable based on normal forward scatter (FSC) and PI exclusion (PI⁻), whereas 95% of the ABT-737 treated MEFs were dead based on reduced FSC and positive PI staining. (C) Control untreated MEFs (viable) and ABT-737 treated MEFs (2.5 μM ABT-737 for 16 h; late apoptotic) were incubated in PBS alone or in the presence of DNaseI, RNaseA, protease K or trypsin. Cells were washed extensively to remove nucleases and proteases, then incubated with biotinylated mClec9A-ecto (solid line), or biotinylated Cire-ecto as a control (dashed line). Binding was detected using SA-PE and flow cytometry. 80% of the untreated MEFs were viable based on normal FSC and PI exclusion, whereas 97% of the ABT-737 treated MEFs were dead based on reduced FSC and positive PI staining.

[0258] FIG. 9. Clec9A binding is mediated via the CTLD and is directed against a protein expressed by diverse species. (A) Viable or freeze-thawed mouse fibroblasts (3T3 cell line) were incubated with biotinylated mClec9A or hCLEC9A ectodomains or CTLD (solid line), or with biotinylated control (Cire-ecto, dashed line). (B) Human 293T cells were freeze-thawed then incubated with biotinylated mClec9A-ecto, hCLEC9A-ecto (solid line) or Cire (dashed line) in the absence or presence of 5 mM EDTA (solid line). (C) Mouse 3T3 cells, insect SF21 cells, bacterial JM109 cells and yeast (Pichia pastoris) cells were freeze-thawed twice then incubated with biotinylated mClec9A-ecto (solid line), or biotinylated control (Cire-ecto, dashed line). Binding in (A)-(C) was detected using SA-PE and flow cytometry.

[0259] FIG. 10. Binding of Clec9A to a cytoskeletal component of red blood cell membranes. (A) Live RBC or RBC membranes (Saponin ghosts) were incubated with biotinylated mClec9A-ecto, mClec9A-CTLD (solid line) or with biotinylated control proteins mClec12A (solid line) or Cire (dashed line). (B) RBC membranes (Saponin ghosts) were treated in the absence (thick solid line) or presence of spectrin removal buffer (thin solid line) before incubating with biotinylated mClec9A-ecto, mClec9A-CTLD (solid line) or with the biotinylated control protein Cire (dashed line). Binding in (A)-(B) was detected using SA-PE and flow cytometry.

[0260] FIG. 11. Clec9A binds to purified spectrin. ELISA plates were coated with spectrin or actin protein (10 μg/ml), then probed with graded concentration of purified biotinylated Clec9A-ecto, Clec9A-CTLD or control protein Cire. Bound proteins were detected using SA-HRP and visualized using ABTS. The cumulative data of three experiments is presented. Clec9A-ecto bound spectrin more efficiently than Clec9A-CTLD. Neither Clec9A-ecto nor Clec9A-CTLD bound to actin. The control protein Cire did not bind spectrin or actin.

[0261] FIG. 12. Soluble mClec9A does not block uptake of dead cells by CD8⁺ DC. (A) Surface expression of Clec9A on splenic cDCs. DCs were blocked using rat Ig and anti FcR mAb (2.4G2) and surface labelled using mAb against CD11c (N418-PE-Cy7), CD45RA (14.8-APC), CD8 (53-6.7-APC-Cy7), CD172a (p84-FITC) and either Clec9A (24/04-10B4-biotin) or an isotype control-biotin (IgG2a-kappa; BD Pharmingen), then counterstained with SA-PE and analysed by flow cytometry. Splenic cDCs were gated as CD 11 C^{hi} CD45RA⁻ CD172a^{hi} CD8⁻ (CD8⁻) or as CD11c^{hi} CD45RA⁻ CD172a^{lo} CD8⁺ (CD8⁺) and analysed for their surface expression of Clec9A. The solid line represents mClec9A staining on gated cells, the dotted line represents staining of the gated cells using an isotype matched control. (B) Phagocytic uptake of dead cells by splenic cDCs. Splenocytes were freeze-thawed then labelled with PI, then incubated in the absence or presence of mClec9A-ecto. DCs were surface labelled with mAb against CD11c and CD8, then cocultured with the PI labelled splenocytes for 3 h at 4° C. or at 37° C. DCs were gated as CD8⁺ (CD11c^{hi} CD8⁺) or CD8⁻ (CD11c^{hi}CD8⁻) and analysed for the percentage of cells that were PI positive as a measure of dead cell uptake.

[0262] FIG. 13. A) mClec9A and hCLEC9A bind to RNF41. mClec9A-ecto, hClec9A-ecto and mClec12A-ecto were incubated with bead bound RNF41-fusion proteins. Bound proteins were eluted and detected using anti-Flag-HRP (lane 1:GST-RNF41_{FL}, lane 2: GST-RNF41₇₂₋₃₁₇, lane3: GST control). A sample of the purified Clec-ecto is shown in lane 4. B) Coomassie staining of GST-RNF41 fusion proteins eluted from glutathione beads.

### Key to the Sequence Listing

### SEQ ID NO:1—Human 5B6.

### SEQ ID NO:2—Murine 5B6.

### SEQ ID NO:3—Chimpanzee 5B6.

[0263] SEQ ID NO:4—Rhesus monkey 5B6.

### SEQ ID NO:5—Dog 5B6.

### SEQ ID NO:6—Cow 5B6.

### SEQ ID NO:7—Horse 5B6.

### SEQ ID NO:8—Rat 5B6.

[0264] SEQ ID NO:9—Open reading frame encoding human 5B6.
SEQ ID NO:10—Open reading frame encoding murine 5B6.
SEQ ID NO:11—Open reading frame encoding chimpanzee 5B6.
SEQ ID NO:12—Open reading frame encoding rhesus monkey 5B6.
SEQ ID NO:13—Open reading frame encoding dog 5B6.
SEQ ID NO:14—Open reading frame encoding cow 5B6.
SEQ ID NO:15—Open reading frame encoding horse 5B6.
SEQ ID NO:16—Open reading frame encoding rat 5B6.
SEQ ID NO's 17 to 28, 38 and 39—Oligonucleotide primers.
SEQ ID NO:29—Antigenic fragment of murine 5B6.
SEQ ID NO:30—Antigenic fragment of human 5B6.
SEQ ID NO:31—Biotinylation consensus sequence.
SEQ ID NO:32—Partial sequence of mouse Clec12a.
SEQ ID NO:33—Partial sequence of mouse Dectin-1.
SEQ ID NO:34—Partial sequence of mouse Clec8a.
SEQ ID NO:35—Partial sequence of mouse NKG2D.
SEQ ID NO:36—Partial sequence of human NKG2D.
SEQ ID NO:37—Partial sequence of rat MBP-A.
SEQ ID NO:40—Soluble mouse 5B6 including stalk.
SEQ ID NO:41—Soluble human 5B6 including stalk.
SEQ ID NO:42—Soluble mouse 5B6 without stalk.
SEQ ID NO:43—Soluble human 5B6 without stalk.
SEQ ID NO:44—Soluble flag tagged mouse 5B6 including stalk.
SEQ ID NO:45—Soluble flag tagged human 5B6 including stalk.
SEQ ID NO:46—Soluble flag tagged mouse 5B6 without stalk.
SEQ ID NO:47—Soluble flag tagged human 5B6 without stalk.
SEQ ID NO:48—Human erythrocytic spectrin, alpha 1 (elliptocytosis 2 or SPTA1).
SEQ ID NO:49—Human non-erythrocytic spectrin, alpha 1 (alpha-fodrin or SPTAN1) (isoform 1).
SEQ ID NO:50—Human non-erythrocytic spectrin, alpha 1 (alpha-fodrin or SPTAN1) (isoform 2).
SEQ ID NO:51—Human erythrocytic beta spectrin, or SPTB (isoform a).
SEQ ID NO:52—Human erythrocytic beta spectrin, or SPTB (isoform b).
SEQ ID NO:53—Human non-erythrocytic beta spectrin 1, or SPTBN1 (isoform 1).
SEQ ID NO:54—Human non-erythrocytic beta spectrin 1, or SPTBN1 (isoform 2).
SEQ ID NO:55—Human non-erythrocytic beta spectrin 2, or SPTBN2.
SEQ ID NO:56—Mouse spectrin alpha 1, or SPNA1.
SEQ ID NO:57—Mouse spectrin alpha 2, or SPNA2.
SEQ ID NO:58—Mouse spectrin beta 1, or SPNB1.
SEQ ID NO:59—Mouse spectrin beta 2, or SPNB2 (isoform 1).
SEQ ID NO:60—Mouse spectrin beta 2, or SPNB2 (isoform 2).
SEQ ID NO:61—Mouse spectrin beta 3, or SPNB3.
SEQ ID NO:62—Mouse spectrin beta 4, or SPNB4.
SEQ ID NO:63—Mouse spectrin beta 5, or SPNB5.
SEQ ID NO:64—Chimpanzee erythrocytic alpha 1 spectrin, (elliptocytosis 2 or SPTA1) (isoform 1).
SEQ ID NO:65—Chimpanzee erythrocytic alpha 1 spectrin, (elliptocytosis 2 or SPTA1) (isoform 2).
SEQ ID NO:66—Chimpanzee erythrocytic alpha 1 spectrin, (elliptocytosis 2 or SPTA1) (isoform 3).
SEQ ID NO:67—Chimpanzee erythrocytic beta spectrin, or SPTB (isoform 1).
SEQ ID NO:68—Chimpanzee erythrocytic beta spectrin, or SPTB (isoform 2).
SEQ ID NO:69—Chimpanzee erythrocytic beta spectrin, or SPTB (isoform 3).
SEQ ID NO:70—Chimpanzee erythrocytic beta spectrin, or SPTB (isoform 4).
SEQ ID NO:71—Chimpanzee non-erythrocytic beta spectrin 1, or SPTBN1 (isoform 1).
SEQ ID NO:72—Chimpanzee non-erythrocytic beta spectrin 2, or SPTBN2 (isoform 1).
SEQ ID NO:73—Horse erythrocytic alpha spectrin 1 (elliptocytosis 2 or SPTA1).
SEQ ID NO:74—Horse erythrocytic beta spectrin, or SPTB.
SEQ ID NO:75—Horse non-erythrocytic beta spectrin 1, or SPTBN1.
SEQ ID NO:76—Human RNF41 RING (Really Interesting New Gene) finger protein 41 (isoform 1).
SEQ ID NO:77—Human RNF41 RING (Really Interesting New Gene) finger protein 41 (isoform 2).
SEQ ID NO:78—Mouse RNF41 RING (Really Interesting New Gene) finger protein 41 (isoform 1).
SEQ ID NO:79—Chimpanzee RNF41 RING (Really Interesting New Gene) finger protein 41 (isoform 1).
SEQ ID NO:80—Horse RNF41 RING (Really Interesting New Gene) finger protein 41.
SEQ ID NO:81—Open reading frame encoding human erythrocytic spectrin, alpha 1 (ellipiocytosis 2 or SPTA1).
SEQ ID NO:82—Open reading frame encoding human non-erythrocytic spectrin, alpha 1 (alpha-fodrin or SPTAN1) (isoform 1).
SEQ ID NO:83—Open reading frame encoding human non-erythrocytic spectrin, alpha 1 (alpha-fodrin or SPTAN1) (isoform 2).
SEQ ID NO:84—Open reading frame encoding human erythrocytic beta spectrin, or SPTB (isoform a).
SEQ ID NO:85—Open reading frame encoding human erythrocytic beta spectrin, or SPTB (isoform b).
SEQ ID NO:86—Open reading frame encoding human non-erythrocytic beta spectrin 1, or SPTBN1 (isoform 1).
SEQ ID NO:87—Open reading frame encoding human non-erythrocytic beta spectrin 1, or SPTBN1 (isoform 2).
SEQ ID NO:88—Open reading frame encoding human non-erythrocytic beta spectrin 2, or SPTBN2.
SEQ ID NO:89—Open reading frame encoding mouse spectrin alpha 1, or SPNA1.
SEQ ID NO:90—Open reading frame encoding. mouse spectrin alpha 2, or SPNA2.
SEQ ID NO:91—Open reading frame encoding. mouse spectrin beta 1, or SPNB1.
SEQ ID NO:92—Open reading frame encoding mouse spectrin beta 2, or SPNB2 (isoform 1).
SEQ ID NO:93—Open reading frame encoding mouse spectrin beta 2, or SPNB2 (isoform 2).
SEQ ID NO:94—Open reading frame encoding mouse spectrin beta 3, or SPNB3.
SEQ ID NO:95—Open reading frame encoding mouse spectrin beta 4, or SPNB4.
SEQ ID NO:96—Open reading frame encoding mouse spectrin beta 5, or SPNB5.
SEQ ID NO:97—Open reading frame encoding chimpanzee erythrocytic alpha 1 spectrin, (elliptocytosis 2 or SPTA1) (isoform 1).
SEQ ID NO:98—Open reading frame encoding chimpanzee erythrocytic alpha 1 spectrin, (elliptocytosis 2 or SPTA1) (isoform 2).
SEQ ID NO:99—Open reading frame encoding chimpanzee erythrocytic alpha 1 spectrin, (elliptocytosis 2 or SPTA1) (isoform 3).
SEQ ID NO:100—Open reading frame encoding chimpanzee erythrocytic beta spectrin, or SPTB (isoform 1).
SEQ ID NO:101—Open reading frame encoding chimpanzee erythrocytic beta spectrin, or SPTB (isoform 2).
SEQ ID NO:102—Open reading frame encoding chimpanzee erythrocytic beta spectrin, or SPTB (isoform 3).
SEQ ID NO:103—Open reading frame encoding chimpanzee erythrocytic beta spectrin, or SPTB (isoform 4).
SEQ ID NO:104—Open reading frame encoding chimpanzee non-erythrocytic beta spectrin 1, or SPTBN1 (isoform 1).
SEQ ID NO:105—Open reading frame encoding chimpanzee non-erythrocytic beta spectrin 2, or SPTBN2 (isoform 1).
SEQ ID NO:106—Open reading frame encoding horse erythrocytic alpha spectrin 1 (elliptocytosis 2 or SPTA1).
SEQ ID NO:107—Open reading frame encoding horse erythrocytic beta spectrin, or SPTB.
SEQ ID NO:108—Open reading frame encoding horse non-erythrocytic beta spectrin 1, or SPTBN1.
SEQ ID NO:109—Open reading frame encoding human RNF41 RING (Really Interesting New Gene) finger protein 41 (isoform 1).
SEQ ID NO:110—Open reading frame encoding human RNF41 RING (Really Interesting New Gene) finger protein 41 (isoform 2).
SEQ ID NO:111—Open reading frame encoding mouse RNF41 RING (Really Interesting New Gene) finger protein 41 (isoform 1).
SEQ ID NO:112—Open reading frame encoding chimpanzee RNF41 RING (Really Interesting New Gene) finger protein 41 (isoform 1).
SEQ ID NO:113—Open reading frame encoding horse RNF41 RING (Really Interesting New Gene) finger protein 41.

### DETAILED DESCRIPTION OF THE INVENTION

### General Techniques and Definitions

[0265] Unless specifically defined otherwise, all technical and scientific terms used herein shall be taken to have the same meaning as commonly understood by one of ordinary skill in the art (e.g., in cell culture, molecular genetics, molecular biology, immunology, immunohistochemistry, protein chemistry, and biochemistry).

[0266] Unless otherwise indicated, the recombinant protein, cell culture, and immunological techniques utilized in the present invention are standard procedures, well known to those skilled in the art. Such techniques are described and explained throughout the literature in sources such as, J. Perbal, A Practical Guide to Molecular Cloning, John Wiley and Sons (1984), J. Sambrook et al., Molecular Cloning: A Laboratory Manual, Cold Spring Harbour Laboratory Press (1989), T. A. Brown (editor), Essential Molecular Biology: A Practical Approach, Volumes 1 and 2, IRL Press (1991), D. M. Glover and B. D. Hames (editors), DNA Cloning: A Practical Approach, Volumes 1-4, IRL Press (1995 and 1996), and F. M. Ausubel et al. (editors), Current Protocols in Molecular Biology, Greene Pub. Associates and Wiley-Interscience (1988, including all updates until present), Ed Harlow and David Lane (editors) Antibodies: A Laboratory Manual, Cold Spring Harbour Laboratory, (1988), and J. E. Coligan et al. (editors) Current Protocols in Immunology, John Wiley & Sons (including all updates until present).

[0267] The phrase “cells with a disrupted cell membrane, cells infected with a pathogen, dying cells or dead cells”, and variations thereof, as used herein includes situations where the cell can have, where possible, one or more of these features. For example, the cell could have a disrupted membrane, be infected with a pathogen and be dying.

[0268] As used herein, the term “cells with a disrupted cell membrane” or “cell with a disrupted cell membrane” refers to cells where the integrity of the cell membrane has been compromised. This includes cells with pores, as well as damaged or ruptured cells.

[0269] As used herein, the term “dying cell” or “dying cells” refers to later stage apoptotic cells or necrotic cells. Preferably, the dying cell(s) are AnnexinV⁺ or they are propidium iodide (PI)⁺. For dying cells with a nuclei, it is preferred that they are AnnexinV⁺ and PI⁺. In a particularly preferred embodiment, the dying cells are at least AnnexinV⁺. In yet another embodiment, the necrotic cells are secondary necrotic cells.

[0270] As used herein, “early apoptotic cell” or “early apoptotic cells” includes cells that are AnnexinV⁺ and PI⁺.

[0271] As used herein, the term “dead cell” or “dead cells” refers to cell(s) that has passed a point of no return in the death process and which changes cannot be reversed. The cell(s) may have died through apoptosis or necrosis.

[0272] With regard to the phrase “cells infected with a pathogen”, the term pathogen includes any organism which can infect a cell. Examples include, but are not limited to, viruses, protozoa and bacteria.

[0273] As used herein, the term “or portion thereof” refers to any part of cells with a disrupted cell membrane, cells infected with a pathogen, dying cells or dead cells which comprise a ligand of a polypeptide defined herein. Examples include, but are not limited to, blebs and cell homogenates/lysates.

[0274] As used herein, the term “uptake and/or clearance” of cells with a disrupted cell membrane, cells infected with a pathogen, dying cells or dead cells, or a portion thereof, refers to the removal of cellular material, such a proteins or fragments thereof, of the cells. In an embodiment, dendritic cells are responsible, at least in part, for the uptake and/or clearance of the cells. Preferably, the dendritic cells are 5B6⁺ (also known as Clec9A⁺).

[0275] As used herein, the term “surrounding cells” refers to cells in close proximity to one or more of cells with a disrupted cell membrane, cells infected with a pathogen, dying cells or dead cells.

[0276] As used herein, the terms “treating”, “treat” or “treatment” include administering a therapeutically effective amount of a compound useful for the invention sufficient to reduce or eliminate at least one symptom of the specified condition.

[0277] As used herein, the terms “preventing”, “prevent” or “prevention” include administering a therapeutically effective amount of a compound useful for the invention sufficient to stop or hinder the development of at least one symptom of the specified condition.

[0278] As used herein, the term “diagnosing” or variations thereof refers to the detection of a disease.

[0279] As used herein, the term “prognosing” or variations thereof refers to an assessment of the future outcome of a disease.

[0280] As used herein, the term “monitoring the status” or variations thereof refers to determining the stage of a disease. The status can be determined before, during and/or after a subject has been administered with a treatment for the disease.

[0281] As used herein, the term “5B6” and “Clec9A” refers to a polypeptide which comprises;

[0282] i) an amino acid sequence as provided in any one of SEQ ID NO's 1 to 8;

[0283] ii) an amino acid sequence which is at least 50% identical to any one or more of SEQ ID NO's 1 to 8; and/or

[0284] iii) a biologically active, soluble and/or antigenic fragment of i) or ii). Preferably, the polypeptide is at least expressed on a subset of dendritic cells.

[0285] As used herein, in some embodiments the “sample” can be any biological material suspected of having cells with a disrupted cell membrane, cells infected with a pathogen, dying cells or dead cells, or a portion thereof. In other embodiments, the “sample” can be any biological material suspected of having 5B6+ dendritic cells Examples include, but are not limited to, blood, for example, whole peripheral blood, cord blood, fetus blood, bone marrow, plasma, serum, urine, cultured cells, saliva or urethral swab, lymphoid tissues, for example tonsils, peters patches, appendix, thymus, spleen and lymph nodes, and any biopsy samples taken for routine screening, diagnostic or surgical reason such as tumour biopsy or biopsy of inflamed organs/tissues. The sample may be tested directly or may require some form of treatment prior to testing. For example, a biopsy sample may require homogenization to produce a cell suspension prior to testing. Furthermore, to the extent that the biological sample is not in liquid form (for example, it may be a solid, semi-solid or a dehydrated liquid sample), it may require the addition of a reagent, such as a buffer, to mobilize the sample. The mobilizing reagent may be mixed with the sample prior to placing the sample in contact with a compound as defined herein.

[0286] As used herein, the terms “conjugate”, “conjugated” or variations thereof are used broadly to refer to any form to covalent or non-covalent association between a compound useful for the invention and a therapeutic agent or a detectable label, or to placing a compound useful for the invention and a therapeutic agent or detectable label in close proximity to each other such as in a liposome.

[0287] As used herein, the term “immune response” refers to an alteration in the reactivity of the immune system of a subject in response to an antigen and may involve antibody production, induction of cell-mediated immunity, complement activation and/or development of immunological tolerance.

[0288] As used herein, the phrase “disrupting the cell membrane of the cell” refers to any method that compromises the integrity of the cell membrane. Examples of such methods include, but are not limited to, irradiation, exposure to a detergent and freeze/thawing. In an embodiment, the cell is killed by the method.

[0289] As used herein, the term “subject” preferably relates to an animal. More preferably, the subject is a mammal such as a human, dog, cat, horse, cow, or sheep. Most preferably, the subject is a human.

### 5B6 (Clec9A) Ligands

[0290] As used herein, the term “5B6 ligand” or “Clec9A ligand” or variations thereof refers to a protein defined herein which binds 5B6 (Clec9A), namely spectrin, RNF41 as well as variants/mutants/fragments thereof.

### Spectrin

[0291] The term “spectrin” as used herein refers to membrane-associated cytoskeletal proteins involved in the crosslinking of filamentous actin which act as molecular scaffold proteins to link the actin cytoskeleton to the plasma membrane, and function in the determination of cell shape, arrangement of transmembrane proteins, and organization of organelles (Broderick and Winder, 2005).

[0292] The spectrins are traditionally divided into erythrocytic and non-erythrocytic forms, the former being exclusive to red blood cells and being responsible for the elasticity of RBCs. Spectrins are ubiquitous in cells and different isoforms may be expressed in different tissues in different organisms. Spectrins are highly modular proteins, containing many repeating alpha-helical 106-amino acid units (or ‘spectrin repeats’).

[0293] Alpha forms generally contain 20 spectrin repeats and, in contrast to the beta forms, generally lack an actin-binding domain (ABD). Most alpha forms contain and SH3 (Src homology 3 domains) for binding polyproline-containing proteins. Non-erythrocytic alpha isoforms generally contain an EF-hand motif for binding calcium. Examples of erythrocytic alpha forms of spectrin are given as SEQ ID Nos: 48, 64-66 and 73. Examples of non-erythrocytic alpha forms of spectrin are given as SEQ ID Nos: 49-50. Mutations in the human SPTA1 gene (encoding erythrocytic spectrin alpha 1) are the cause of elliptocytosis type 2 (EL2), an autosomal dominant hematological disorder characterised by hemolytic anemia and elliptical or oval RBC shape. SPTA1 mutations also cause hereditary pyropoikilocytosis (HPP) and spherocytosis type III (SPH3), both being hemolytic disorders. Mutations in the non-erythrocytic alpha 1 gene (SPTAN1) cause Sjogrens syndrome, autoimmune diseases, rheumatoid arthritis, multiple sclerosis, neurodegenerative diseases and xerostomia. Non-erythrocytic forms of alpha 1 spectrin (encoded by the SPTAN1 gene) are also known as alpha-fodrin.

[0294] Beta forms generally contain 17 spectrin repeats and an actin-binding domain (ABD). ABDs generally contain two CH (calponin homology) domains, which enable beta forms of spectrin to interact with F-actin. Non-erythrocytic forms of beta spectrin contain a PH (pleckstrin homology) domain for interaction with membrane phospholipids. Beta forms of spectrin generally lack EF-hand motifs. Examples of erythrocytic beta forms of spectrin are given as SEQ ID Nos:51-52, 67-70 and 74. Examples of non-erythrocytic beta forms of spectrin are given as SEQ ID Nos: 53-55, 71-72 and 75. Mutations in the human SPTB gene (encoding erythrocytic spectrin beta) are the cause of RBC disorders including elliptocytosis type 3 (EL3), spherocytosis type I (SPH1), muscular dystrophy, various anemic disease and pyropoikilocytosis. Mutations in the non-erythrocytic beta 1 gene (SPTBN1) cause neurofibromatosis type 2 and leukemia. Non-erythrocytic forms of beta 1 spectrin (encoded by the SPTBN1 gene) are also known as beta-fodrin.

[0295] Spectrin functions as a tetramer of alpha and beta dimers linked in a head-to-head arrangement. Alpha and beta spectrin interact to form a dimer and two heterodimers form the functional tetramer. Tetramers bind via their tail ends to a junctional complex consisting of filamentous actin and band 4.1 protein. Spectrin also binds to integral membrane proteins via ankyrin and band 3 protein (especially in RBCS) and also via protein 4.1 and glycophorin C. Interactions also occur with phospholipids via the PH domains of beta spectrin.

### RNF-41 Protein

[0296] RNF-41 protein is also known as RING (Really Interesting New Gene) finger protein, neuregulin receptor degradation protein-1 (NRDP1), or fetal liver RING protein (FLRF), refers to a protein which acts as an E3-ubiquitin ligase and regulates the degradation of target proteins. Target proteins for RNF-41 include members of the EGF (epidermal growth factor) receptor family, for example ErbB3 (or Her3). Other targets of RNF_{—}41 include ErbB4, ubiquitin-specific protease 8 (Usp8), Birch and reticulon 4 (Rtn4, also known as NogoA). Mutations in RNF-41 have been linked to tumour diseases. Overexpression of RNF-41 has been shown to decrease ErbB3 and inhibition of breast cancer growth. Decreased levels of RNF-41 are inversely correlated with ErbB3 levels in primary human breast cancer tissue.

[0297] In humans, three transcript variants encode 2 isoforms of RNF-41, namely isoform 1 and 2, given in SEQ ID Nos:76 and 77, respectively. Examples of RNF-41 proteins from other organisms are given in SEQ ID Nos: 78-80.

### Compounds

[0298] The present inventors have previously shown that 5B6 (also referred to in the art as CLEC9A and HEEE9341) is expressed in a subset of dendritic cells, can be targeted to modulate an immune response, and binds a ligand on cells with a disrupted cell membrane, cells infected with a pathogen, dying cells and dead cells (Caminschi et al., 2008; WO 09/026,660; U.S. 61/052,983; WO 09/137,871; U.S. 61/120,801). This enabled compounds which modulate the binding of 5B6 to the ligand, and/or compounds which modulate the production the ligand to be used in a wide variety of diagnostic, prognostic and therapeutic procedures. The present inventors have now identified further molecules which bind 5B6 which can be used to, inter alia, target therapeutic molecules to dendritic cells.

[0299] Compounds useful for the invention include the ligands such as spectrin or RNF41 modified to deliver a therapeutic agent, as well as those which bind, preferably which specifically bind, these ligands. The binding may be mediated by covalent or non-covalent interactions or a combination of covalent and non-covalent interactions. When the interaction produces a non-covalently bound complex, the binding which occurs is typically electrostatic, hydrogen-bonding, or the result of hydrophilic/lipophilic interactions. In a preferred embodiment, the compound is a purified and/or recombinant polypeptide.

[0300] Although not essential, the compound may bind specifically to 5B6 or the ligand. The phrase “specifically binds”, means that under particular conditions, the compound binds 5B6 or the ligand and does not bind to a significant amount to other, for example, proteins or carbohydrates. In one embodiment, the compound specifically binds 5B6 and not other molecules in a sample obtained from a subject comprising dendritic cells. In another embodiment, the compound specifically binds the ligand and not other molecules in a sample obtained from a subject comprising cells with a disrupted cell membrane, cells infected with a pathogen, dying cells or dead cells, or a portion thereof. Specific binding under such conditions may require an antibody that is selected for its specificity. In another embodiment, a compound is considered to “specifically binds” if there is a greater than 5-fold difference, and preferably a 25, 50 or 100 fold greater difference between the binding of the compound when compared to another protein.

### Antibodies

[0301] In one embodiment, the compound that binds the ligand, such as spectrin or RNF41, comprises an antibody or antigen binding fragment thereof. The terms “antibodies” and “immunoglobulin” refers to a class of structurally related glycoproteins consisting of two pairs of polypeptide chains, one pair of light (L) low molecular weight chains and one pair of heavy (H) chains, all four inter-connected by disulfide bonds. The structure of immunoglobulins has been well characterized, see for instance Fundamental Immunology Ch. 7 (Paul, W., ed., 2nd ed. Raven Press, N.Y. (1989)). Briefly, each heavy chain typically is comprised of a heavy chain variable region (abbreviated herein as V_{H}) and a heavy chain constant region (abbreviated herein as C_{H}). The heavy chain constant region typically is comprised of three domains, C_{H}1, C_{H}2, and C_{H}3. Each light chain typically is comprised of a light chain variable region (abbreviated herein as V_{L}) and a light chain constant region (abbreviated herein as C_{L}). The light chain constant region typically is comprised of one domain, C_{L}. The V_{H} and V_{L} regions may be further subdivided into regions of hypervariability (or hypervariable regions which may be hypervariable in sequence and/or form of structurally defined loops), also termed complementarity determining regions (CDRs), interspersed with regions that are more conserved, termed framework regions (FRs).

[0302] Each V_{H} and V_{L} is typically composed of three CDRs and four FRs, arranged from amino-terminus to carboxy-terminus in the following order: FR1, CDR1, FR2, CDR2, FR3, CDR3, FR4 (see also Chothia and Lesk, 1987). Typically, the numbering of amino acid residues in this region is performed by the method described in Kabat et al., Sequences of Proteins of Immunological Interest, 5th Ed. Public Health Service, National Institutes of Health, Bethesda, Md. (1991) (phrases such as variable domain residue numbering as in Kabat or according to Kabat herein refer to this numbering system for heavy chain variable domains or light chain variable domains). Using this numbering system, the actual linear amino acid sequence of a peptide may contain fewer or additional amino acids corresponding to a shortening of, or insertion into, a FR or CDR of the variable domain.

[0303] The term “humanized antibody”, as used herein, refers to herein an antibody derived from a non-human antibody, typically murine, that retains or substantially retains the antigen-binding properties of the parent antibody but which is less immunogenic in humans.

[0304] The term complementarity determining region (CDR), as used herein, refers to amino acid sequences which together define the binding affinity and specificity of a variable fragment (Fv) region of a immunoglobulin binding site.

[0305] The term framework region (FR), as used herein, refers to amino acid sequences interposed between CDRs. These portions of the antibody serve to hold the CDRs in appropriate orientation (allows for CDRs to bind antigen). A variable region, either light or heavy, comprises a framework and typically three CDRs.

[0306] The term constant region (CR) as used herein, refers to the portion of the antibody molecule which confers effector functions. The constant regions of the subject humanized antibodies are derived from human immunoglobulins. The heavy chain constant region can be selected from any of the five isotypes: alpha, delta, epsilon, gamma or mu. Further, heavy chains of various subclasses (such as the IgG subclasses of heavy chains) are responsible for different effector functions and thus, by choosing the desired heavy chain constant region, antibodies with desired effector function can be produced. Preferred heavy chain constant regions are gamma 1 (IgG1), gamma 2 (IgG2), gamma 3 (IgG3) and gamma 4 (IgG4), more preferably gamma 4 (IgG4). The light chain constant region can be of the kappa or lambda type, preferably of the kappa type.

[0307] Antibodies may exist as intact immunoglobulins, or as modifications in a variety of forms including, for example, but not limited to, domain antibodies including either the VH or VL domain, a dimer of the heavy chain variable region (VHH, as described for a camelid), a dimer of the light chain variable region (VLL), Fv fragments containing only the light and heavy chain variable regions, or Fd fragments containing the heavy chain variable region and the CH1 domain. A scFv consisting of the variable regions of the heavy and light chains linked together to form a single-chain antibody (Bird et al., 1988; Huston et al., 1988) and oligomers of scFvs such as diabodies and triabodies are also encompassed by the term “antibody”. Also encompassed are fragments of antibodies such as Fab, (Fab′)₂ and FabFc₂ fragments which contain the variable regions and parts of the constant regions. CDR-grafted antibody fragments and oligomers of antibody fragments are also encompassed. The heavy and light chain components of an Fv may be derived from the same antibody or different antibodies thereby producing a chimeric Fv region. The antibody may be of animal (for example mouse, rabbit or rat) or human origin or may be chimeric (Morrison et al., 1984) or humanized (Jones et al., 1986), and UK 8707252). As used herein the term “antibody” includes these various forms. Using the guidelines provided herein and those methods well known to those skilled in the art which are described in the references cited above and in such publications as Harlow & Lane (supra) the antibodies for use in the methods of the present invention can be readily made.

[0308] As used herein, an “antigenic binding fragment” refers to a portion of an antibody as defined herein that is capable of binding the same antigen as the full length molecule.

[0309] Antibodies or antigen binding fragments of the invention which are not from a natural source, such as a humanized antibody, preferably retain a significant proportion of the binding properties of the parent antibody. In particular, such antibodies or fragments of the invention retain the ability to specifically bind the antigen recognized by the parent antibody used to produce the antibody or fragment such as a humanized antibody. Preferably, the antibody or fragment exhibits the same or substantially the same antigen-binding affinity and avidity as the parent antibody. Ideally, the affinity of the antibody or fragment will not be less than 10% of the parent antibody affinity, more preferably not less than about 30%, and most preferably the affinity will not be less than 50% of the parent antibody. Methods for assaying antigen-binding affinity are well known in the art and include half-maximal binding assays, competition assays, and Scatchard analysis.

[0310] A variety of immunoassay formats may be used to select antibodies or fragments that are specifically immunoreactive with the ligand. For example, surface labelling and flow cytometric analysis or solid-phase ELISA immunoassays are routinely used to select antibodies specifically immunoreactive with a protein or carbohydrate. See Harlow & Lane (supra) for a description of immunoassay formats and conditions that can be used to determine specific immunoreactivity.

[0311] The antibodies may be Fv regions comprising a variable light (V_{L}) and a variable heavy (V_{H}) chain. The light and heavy chains may be joined directly or through a linker. As used herein a linker refers to a molecule that is covalently linked to the light and heavy chain and provides enough spacing and flexibility between the two chains such that they are able to achieve a conformation in which they are capable of specifically binding the epitope to which they are directed. Protein linkers are particularly preferred as they may be expressed as an intrinsic component of the Ig portion of the fusion polypeptide.

[0312] In another embodiment, recombinantly produced single chain scFv antibody, preferably a humanized scFv, is used in the methods of the invention.

### Monoclonal Antibodies

[0313] Monoclonal antibodies directed against the 5B6 ligands described herein can be readily produced by one skilled in the art.

[0314] The general methodology for making monoclonal antibodies by hybridomas is well known. Immortal antibody-producing cell lines can be created by cell fusion, and also by other techniques such as direct transformation of B lymphocytes with oncogenic DNA, or transfection with Epstein-Barr virus. Panels of monoclonal antibodies produced against 5B6 ligand epitopes can be screened for various properties; i.e. for isotype and epitope affinity.

[0315] Animal-derived monoclonal antibodies can be used for both direct in vivo and extracorporeal immunotherapy. However, it has been observed that when, for example, mouse-derived monoclonal antibodies are used in humans as therapeutic agents, the patient produces human anti-mouse antibodies. Thus, animal-derived monoclonal antibodies are not preferred for therapy, especially for long term use. With established genetic engineering techniques it is possible, however, to create chimeric or humanized antibodies that have animal-derived and human-derived portions. The animal can be, for example, a mouse or other rodent such as a rat.

[0316] If the variable region of the chimeric antibody is, for example, mouse-derived while the constant region is human-derived, the chimeric antibody will generally be less immunogenic than a “pure” mouse-derived monoclonal antibody. These chimeric antibodies would likely be more suited for therapeutic use, should it turn out that “pure” mouse-derived antibodies are unsuitable.

[0317] Methodologies for generating chimeric antibodies are available to those in the art. For example, the light and heavy chains can be expressed separately, using, for example, immunoglobulin light chain and immunoglobulin heavy chains in separate plasmids. These can then be purified and assembled in vitro into complete antibodies; methodologies for accomplishing such assembly have been described (see, for example, Sun et al., 1986). Such a DNA, construct may comprise DNA encoding functionally rearranged genes for the variable region of a light or heavy chain of an antibody linked to DNA encoding a human constant region. Lymphoid cells such as myelomas or hybridomas transfected with the DNA constructs for light and heavy chain can express and assemble the antibody chains.

[0318] In vitro reaction parameters for the formation of IgG antibodies from reduced isolated light and heavy chains have also been described. Co-expression of light and heavy chains in the same cells to achieve intracellular association and linkage of heavy and light chains into complete H2L2 IgG antibodies is also possible. Such co-expression can be accomplished using either the same or different plasmids in the same host cell.

[0319] In another preferred embodiment of the present invention the antibody is humanized, that is, an antibody produced by molecular modeling techniques wherein the human content of the antibody is maximised while causing little or no loss of binding affinity attributable to the variable region of, for example, a parental rat, rabbit or murine antibody.

[0320] There are several factors to consider in deciding which human antibody sequence to use during the humanisation. The humanisation of light and heavy chains are considered independently of one another, but the reasoning is basically similar for each.

[0321] This selection process is based on the following rationale: A given antibody's antigen specificity and affinity is primarily determined by the amino acid sequence of the variable region CDRs. Variable domain framework residues have little or no direct contribution. The primary function of the framework regions is to hold the CDRs in their proper spatial orientation to recognize antigen. Thus the substitution of animal, for example, rodent CDRs into a human variable domain framework is most likely to result in retention of their correct spatial orientation if the human variable domain framework is highly homologous to the animal variable domain from which they originated. A human variable domain should preferably be chosen therefore that is highly homologous to the animal variable domain(s). A suitable human antibody variable domain sequence can be selected as follow.

[0322] Step 1. Using a computer program, search all available protein (and DNA) databases for those human antibody variable domain sequences that are most homologous to the animal-derived antibody variable domains. The output of a suitable program is a list of sequences most homologous to the animal-derived antibody, the percent homology to each sequence, and an alignment of each sequence to the animal-derived sequence. This is done independently for both the heavy and light chain variable domain sequences. The above analyses are more easily accomplished if only human immunoglobulin sequences are included.

[0323] Step 2. List the human antibody variable domain sequences and compare for homology. Primarily the comparison is performed on length of CDRs, except CDR3 of the heavy chain which is quite variable. Human heavy chains and Kappa and Lambda light chains are divided into subgroups; Heavy chain 3 subgroups, Kappa chain 4 subgroups, Lambda chain 6 subgroups. The CDR sizes within each subgroup are similar but vary between subgroups. It is usually possible to match an animal-derived antibody CDR to one of the human subgroups as a first approximation of homology. Antibodies bearing CDRs of similar length are then compared for amino acid sequence homology, especially within the CDRs, but also in the surrounding framework regions. The human variable domain which is most homologous is chosen as the framework for humanisation.

### The Actual Humanising Methodologies/Techniques

[0324] An antibody may be humanized by grafting the desired CDRs onto a human framework according to EP 0239400. A DNA sequence encoding the desired reshaped antibody can therefore be made beginning with the human DNA whose CDRs it is wished to reshape. The animal-derived variable domain amino acid sequence containing the desired CDRs is compared to that of the chosen human antibody variable domain sequence. The residues in the human variable domain are marked that need to be changed to the corresponding residue in the animal to make the human variable region incorporate the animal-derived CDRs. There may also be residues that need substituting in, adding to or deleting from the human sequence.

[0325] Oligonucleotides are synthesized that can be used to mutagenize the human variable domain framework to contain the desired residues. Those oligonucleotides can be of any convenient size. One is normally only limited in length by the capabilities of the particular synthesizer one has available. The method of oligonucleotide-directed in vitro mutagenesis is well known.

[0326] Synthetic gene sequences, such as those encoding humanized antibodies or fragments thereof, can be commercially ordered through any of a number of service companies, including DNA 2.0 (Menlo Park, Calif.), Geneart (Regensburg, Germany), CODA Genomics (Irvine, Calif.), and GenScript, Corporation (Piscataway, N.J.).

[0327] Alternatively, humanisation may be achieved using the recombinant polymerase chain reaction (PCR) methodology of WO 92/07075. Using this methodology, a CDR may be spliced between the framework regions of a human antibody. In general, the technique of WO 92/07075 can be performed using a template comprising two human framework regions, AB and CD, and between them, the CDR which is to be replaced by a donor CDR. Primers A and B are used to amplify the framework region AB, and primers C and D used to amplify the framework region CD. However, the primers B and C each also contain, at their 5′ ends, an additional sequence corresponding to all or at least part of the donor CDR sequence. Primers B and C overlap by a length sufficient to permit annealing of their 5′ ends to each other under conditions which allow a PCR to be performed. Thus, the amplified regions AB and CD may undergo gene splicing by overlap extension to produce the humanized product in a single reaction.

[0328] Following the mutagenesis reactions to reshape the antibody, the mutagenised DNAs can be linked to an appropriate DNA encoding a light or heavy chain constant region, cloned into an expression vector, and transfected into host cells, preferably mammalian cells. These steps can be carried out in routine fashion. A reshaped antibody may therefore be prepared by a process comprising:

[0329] (a) preparing a first replicable expression vector including a suitable promoter operably linked to a DNA sequence which encodes at least a variable domain of an Ig heavy or light chain, the variable domain comprising framework regions from a human antibody and the CDRs required for the humanized-antibody of the invention;

[0330] (b) preparing a second replicable expression vector including a suitable promoter operably linked to a DNA sequence which encodes at least the variable domain of a complementary Ig light or'heavy chain respectively;

[0331] (c) transforming a cell line with the first or both prepared vectors; and

[0332] (d) culturing said transformed cell line to produce said altered antibody.

[0333] Preferably the DNA sequence in step (a) encodes both the variable domain and each constant domain of the human antibody chain. The humanized antibody can be prepared using any suitable recombinant expression system. The cell line which is transformed to produce the altered antibody may be a Chinese Hamster Ovary (CHO) cell line or an immortalised mammalian cell line, which is advantageously of lymphoid origin, such as a myeloma, hybridoma, trioma or quadroma cell line. The cell line may also comprise a normal lymphoid cell, such as a B-cell, which has been immortalised by transformation with a virus, such as the Epstein-Barr virus. Most preferably, the immortalised cell line is a myeloma cell line or a derivative thereof.

[0334] The CHO cells used for expression of the antibodies may be dihydrofolate reductase (dhfr) deficient and so dependent on thymidine and hypoxanthine for growth. The parental dhfr⁻ CHO cell line is transfected with the DNA encoding the antibody and dhfr gene which enables selection of CHO cell transformants of dhfr positive phenotype. Selection is carried out by culturing the colonies on media devoid of thymidine and hypoxanthine, the absence of which prevents untransformed cells from growing and transformed cells from resalvaging the folate pathway and thus bypassing the selection system. These transformants usually express low levels of the DNA of interest by virtue of co-integration of transfected DNA of interest and DNA encoding dhfr. The expression levels of the DNA encoding the antibody may be increased by amplification using methotrexate (MTX). This drug is a direct inhibitor of the enzyme dhfr and allows isolation of resistant colonies which amplify their dhfr gene copy number sufficiently to survive under these conditions. Since the DNA sequences encoding dhfr and the antibody are closely linked in the original transformants, there is usually concomitant amplification, and therefore increased expression of the desired antibody.

[0335] Another preferred expression system for use with CHO or myeloma cells is the glutamine synthetase (GS) amplification system described in WO 87/04462. This system involves the transfection of a cell with DNA encoding the enzyme GS and with DNA encoding the desired antibody. Cells are then selected which grow in glutamine free medium and can thus be assumed to have integrated the DNA encoding GS. These selected clones are then subjected to inhibition of the enzyme GS using methionine sulphoximine (Msx). The cells, in order to survive, will amplify the DNA encoding GS with concomitant amplification of the DNA encoding the antibody.

[0336] Although the cell line used to produce the humanized antibody is preferably a mammalian cell line, any other suitable cell line, such as a bacterial cell line or a yeast cell line, may alternatively be used. In particular, it is envisaged that E. coli-derived bacterial strains could be used. The antibody obtained is checked for functionality. If functionality is lost, it is necessary to return to step (2) and alter the framework of the antibody.

[0337] Once expressed, the whole antibodies, their dimers, individual light and heavy chains, or other immunoglobulin forms can be recovered and purified according to standard procedures of the art, including ammonium sulfate precipitation, affinity columns, column chromatography, gel electrophoresis and the like (See, generally, Scopes, R., Protein Purification, Springer-Verlag, N.Y. (1982)). Substantially pure immunoglobulins of at least about 90 to 95% homogeneity are preferred, and 98 to 99% or more homogeneity most preferred, for pharmaceutical uses. Once purified, partially or to homogeneity as desired, a humanized antibody may then be used therapeutically or in developing and performing assay procedures, immunofluorescent stainings, and the like (See, generally, Lefkovits and Pernis (editors), Immunological Methods, Vols. I and II, Academic Press, (1979 and 1981)).

[0338] Studies carried out by Greenwood et al. (1993) have demonstrated that recognition of the Fc region of an antibody by human effector cells can be optimised by engineering the constant region of the immunoglobulin molecule. This could be achieved by fusing the variable region genes of the antibody, with the desired specificity, to human constant region genes encoding immunoglobulin isotypes that have demonstrated effective antigen dependent cellular cytotoxicity (ADCC) in human subjects, for example the IgG1 and IgG3 isotypes (Greenwood and Clark, Protein Engineering of Antibody Molecules for Prophylactic and Therapeutic Applications in Man. Mike Clark (editor), Academic Titles, Section II, p. 85-113, (1993)). The resulting chimeric or humanized antibodies should be particularly effective in modulating humoral immunity and/or T-cell mediated immunity.

[0339] Antibodies with fully human variable regions can also be prepared by administering the antigen to a transgenic animal which has been modified to produce such antibodies in response to antigenic challenge, but whose endogenous loci have been disabled. Various subsequent manipulations can be performed to obtain either antibodies per se or analogs thereof (see, for example, U.S. Pat. No. 6,075,181).

### Preparation of Genes Encoding Antibodies or Fragments Thereof

[0340] Genes encoding antibodies, both light and heavy chain genes or portions thereof, e.g., single chain Fv regions, may be cloned from a hybridoma cell line. They may all be cloned using the same general strategy such as RACE using a commercially available kit, for example as produced by Clontech. Typically, for example, poly(A)⁺mRNA extracted from the hybridoma cells is reverse transcribed using random hexamers as primers. For Fv regions, the V_{H} and V_{L} domains are amplified separately by two polymerase chain reactions (PCR). Heavy chain sequences may be amplified using 5′ end primers which are designed according to the amino-terminal protein sequences of the anti-5B6 ligand heavy chains respectively and 3′ end primers according to consensus immunoglobulin constant region sequences (Kabat et al., Sequences of Proteins of Immunological Interest. 5th edition. U.S. Department of Health and Human Services, Public Health Service, National Institutes of Health, Bethesda, Md. (1991)). Light chain Fv regions are amplified using 5′ end primers designed according to the amino-terminal protein sequences of anti-5B6 ligand light chains and in combination with the primer C-kappa. One of skill in the art would recognize that many suitable primers may be employed to obtain Fv regions.

[0341] The PCR products are subcloned into a suitable cloning vector. Clones containing the correct size insert by DNA restriction are identified. The nucleotide sequence of the heavy or light chain coding regions may then be determined from double stranded plasmid DNA using sequencing primers adjacent to the cloning site. Commercially available kits (e.g., the Sequenase™ kit, United States Biochemical Corp., Cleveland, Ohio, USA) may be used to facilitate sequencing the DNA. DNA encoding the Fv regions may be prepared by any suitable method, including, for example, amplification techniques such as PCR and LCR.

[0342] Chemical synthesis produces a single stranded oligonucleotide. This may be converted into double stranded DNA by hybridization with a complementary sequence, or by polymerization with a DNA polymerase using the single strand as a template. While it is possible to chemically synthesize an entire single chain Fv region, it is preferable to synthesize a number of shorter sequences (about 100 to 150 bases) that are later ligated together.

[0343] Alternatively, sub-sequences may be cloned and the appropriate subsequences cleaved using appropriate restriction enzymes. The fragments may then be ligated to produce the desired DNA sequence.

[0344] Once the Fv variable light and heavy chain DNA is obtained, the sequences may be ligated together, either directly or through a DNA sequence encoding a peptide linker, using techniques well known to those of skill in the art. In one embodiment, heavy and light chain regions are connected by a flexible peptide linker (e.g., (Gly₄Ser)₃) which starts at the carboxyl end of the heavy chain Fv domain and ends at the amino terminus of the light chain Fv domain. The entire sequence encodes the Fv domain in the form of a single-chain antigen binding protein.

### Therapeutic Agents

[0345] Compounds defined herein can be used to deliver a therapeutic agent. Examples of therapeutic agents include, but are not limited to, an antigen, a cytotoxic agent, a drug and/or pharmacological agent.

[0346] In some embodiments, the therapeutic agent may be a polypeptide fused to the compound. Fusion polypeptides comprising the compound may be prepared by methods known to one of skill in the art. For example, a gene encoding an Fv region is fused to a gene encoding a therapeutic agent. Optionally, the Fv gene is linked to a segment encoding a peptide connector. The peptide connector may be present simply to provide space between the compound and the therapeutic agent or to facilitate mobility between these regions to enable them to each attain their optimum conformation. The DNA sequence comprising the connector may also provide sequences (such as primer sites or restriction sites) to facilitate cloning or may preserve the reading frame between the sequence encoding the binding moiety and the sequence encoding the therapeutic agent. The design of such connector peptides is well known to those of skill in the art.

[0347] Generally producing fusion polypeptides involves, e.g., separately preparing the Fv light and heavy chains and DNA encoding any other protein to which they are fused and recombining the DNA sequences in a plasmid or other vector to form a construct encoding the particular desired fusion polypeptide. However, a simpler approach involves inserting the DNA encoding the particular Fv region into a construct already encoding the desired fused polypeptide. The DNA sequence encoding the Fv region is inserted into the construct using techniques well known to those of skill in the art.

[0348] Compounds useful for the invention, e.g., recombinant single chain antibodies, may be fused to, or otherwise bound to the therapeutic agent by any method known and available to those in the art. The two components may be chemically bonded together by any of a variety of well-known chemical procedures. For example, the linkage may be by way of heterobifunctional cross-linkers; e.g., SPDP, carbodiimide, glutaraldehyde, or the like. Production of various immunotoxins, as Well as chemical conjugation methods, are well-known within the art (see, for example, “Monoclonal Antibody-Toxin Conjugates: Aiming the Magic Bullet,” Thorpe et al., Monoclonal Antibodies in Clinical Medicine, Academic Press, p. 168-190 (1982); Waldmann, 1991; Vitetta et al., 1987; Pastan et al., 1986; and Thorpe et al., 1987).

[0349] Examples of drugs and/or pharmacological agents include, but are not limited to, agents that promote DC activation (e.g. TLR ligands), agents that suppress DC activation or function (e.g. specific inhibitors or promoters of DC signalling molecules such as kinases and phosphatases), and agents that modulate DC death (e.g. promoters or suppressors of apoptosis). Such drugs and/or pharmacological agents are well known to those skilled in the art.

[0350] The skilled person will appreciate that there are a number of bacterial or plant polypeptide toxins that are suitable for use as cytotoxic agents in the methods of the invention. These polypeptides include, but are not limited to, polypeptides such as native or modified Pseudomonas exotoxin, diphtheria toxin (DT), ricin, abrin, gelonin, momordin II, bacterial RIPs such as shiga and shiga-like toxin a-chains, luffin, atrichosanthin, momordin I, Mirabilis anti-viral protein, pokeweed antiviral protein, byodin 2 (U.S. Pat. No. 5,597,569), gaporin, as well as genetically engineered variants thereof. Native PE and DT are highly toxic compounds that typically bring about death through liver toxicity. Preferably, Pseudomonas exotoxin and DT are modified into a form that removes the native targeting component of the toxin, e.g., domain Ia of Pseudomonas exotoxin and the B chain of DT. One of skill in the art will appreciate that the invention is not limited to a particular cytotoxic agent.

[0351] Other suitable cytotoxic agents for use in the present invention include, but are not limited to, agents such as bacterial or plant toxins, drugs, e.g., cyclophosphamide (CTX; Cytoxan), chlorambucil (CHL; leukeran), cisplatin (Cis P; CDDP; platinol), busulfan (myleran), melphalan, carmustine (BCNU), streptozotocin, triethylenemelamine (TEM), mitomycin C, and other alkylating agents; methotrexate (MTX), etoposide (VP-16; vepesid), 6-mercaptopurine (6 MP), 6-thioguanine (6TG), cytarabine (Ara-C), 5-fluorouracil (5FU), dacarbazine (DTIC), 2-chlorodeoxyadenosine (2-CdA), and other antimetabolites; antibiotics including actinomycin D, doxorubicin (DXR; adriamycin), daunorubicin (daunomycin), bleomycin, mithramycin as well as other antibiotics; alkaloids such as vincristine (VCR), vinblastine, and the like; as well as other anti-cancer agents including the cytostatic agents glucocorticoids such as dexamethasone (DEX; decadron) and corticosteroids such as prednisone, nucleotide enzyme inhibitors such as hydroxyurea, and the like.

[0352] Those skilled in the art will realize that there are numerous other radioisotopes and chemocytotoxic agents that can be coupled to compounds of the invention by well known techniques, and delivered to specifically destroy dendritic cells (see, e.g., U.S. Pat. No. 4,542,225). Examples of photo-activated toxins include dihydropyridine- and omega-cynotoxin. Examples of cytotoxic reagents that can be used include ¹²⁵I, ¹³¹I, ¹¹¹In, ¹²³I, ⁹⁹mTc, and ³²P. The antibody can be labeled with such reagents using techniques known in the art. For example, see Wenzel and Meares, Radioimmunoimaging and Radioimmunotherapy, Elsevier, N.Y. (1983) for techniques relating to the radiolabeling of antibodies (see also, Colcher et al., 1986; “Order, Analysis, Results and Future Prospective of the Therapeutic Use of Radiolabeled Antibody in Cancer Therapy”, Monoclonal Antibodies for Cancer Detection and Therapy, Baldwin et al. (editors), Academic Press, p. 303-16, (1985)).

[0353] In one example, the linker-chelator tiuexutan is conjugated to the compound by a stable thiourea covalent bond to provide a high-affinity chelation site for Indium-111 or Yttrium-90.

### Antigens

[0354] Compounds useful for the methods of the invention may also be conjugated to an “antigen”.

[0355] The term “antigen” is further intended to encompass peptide or protein analogs of known or wild-type antigens such as those described above. The analogs may be more soluble or more stable than wild type antigen, and may also contain mutations or modifications rendering the antigen more immunologically active. Also useful in the present invention are peptides or proteins which have amino acid sequences homologous with a desired antigen's amino acid sequence, where the homologous antigen induces an immune response to the respective tumor or organism.

[0356] A “cancer antigen,” as used herein is a molecule or compound (e.g., a protein, peptide, polypeptide, lipid, glycolipid, carbohydrate and/or DNA) associated with a tumor or cancer cell and which is capable of provoking an immune response when expressed on the surface of an antigen presenting cell in the context of an MHC molecule. Cancer antigens include self antigens, as well as other antigens that may not be specifically associated with a cancer, but nonetheless induce and/or enhance an immune response to and/or reduce the growth of a tumor or cancer cell when administered to an animal.

[0357] An “antigen from a pathogenic and/or infectious organism” as used herein, is an antigen of any organism and includes, but is not limited to, infectious virus, infectious bacteria, infectious parasites including protozoa (such as Plasmodium sp.) and worms and infectious fungi. Typically, for use in the invention the antigen is a protein or antigenic fragment thereof from the organism, or a synthetic compound which is identical to or similar to naturally-occurring antigen which induces an immune response specific for the corresponding organism. Compounds or antigens that are similar to a naturally-occurring organism antigens are well known to those of ordinary skill in the art. A non-limiting example of a compound that is similar to a naturally-occurring organism antigen is a peptide mimic of a polysaccharide antigen.

[0358] Specific embodiments of cancer antigens include, e.g., mutated antigens such as the protein products of the Ras p21 protooncogenes, tumor suppressor p53 and HER-2/neu and BCR-abl oncogenes, as well as CDK4, MUM1, Caspase 8, and Beta catenin; overexpressed antigens such as galectin 4, galectin 9, carbonic anhydrase, Aldolase A, PRAME, Her2/neu, ErbB-2 and KSA, oncofetal antigens such as alpha fetoprotein (AFP), human chorionic gonadotropin (hCG); self antigens such as carcinoembryonic antigen (CEA) and melanocyte differentiation antigens such as Mart 1/Melan A, gp100, gp75, Tyrosinase, TRP1 and TRP2; prostate associated antigens such as PSA, PAP, PSMA, PSM-P1 and PSM-P2; reactivated embryonic gene products such as MAGE 1, MAGE 3, MAGE 4, GAGE 1, GAGE 2, BAGE, RAGE, and other cancer testis antigens such as NY-ESO1, SSX2 and SCP1; mucins such as Muc-1 and Muc-2; gangliosides such as GM2, GD2 and GD3, neutral glycolipids and glycoproteins such as Lewis (y) and globo-H; and glycoproteins such as Tn, Thompson-Freidenreich antigen (TF) and sTn.

[0359] Cancer antigens and their respective tumor cell targets include, e.g., cytokeratins, particularly cytokeratin 8, 18 and 19, as antigens for carcinoma. Epithelial membrane antigen (EMA), human embryonic antigen (HEA-125), human milk fat globules, MBr1, MBr8, Ber-EP4, 17-1A, C26 and T16 are also known carcinoma antigens. Desmin and muscle-specific actin are antigens of myogenic sarcomas. Placental alkaline phosphatase, beta-human chorionic gonadotropin, and alpha-fetoprotein are antigens of trophoblastic and germ cell tumors. Prostate specific antigen is an antigen of prostatic carcinomas, carcinoembryonic antigen of colon adenocarcinomas. HMB-45 is an antigen of melanomas. In cervical cancer, useful antigens could be encoded by human papilloma virus. Chromagranin-A and synaptophysin are antigens of neuroendocrine and neuroectodermal tumors. Of particular interest are aggressive tumors that form solid tumor masses having necrotic areas.

[0360] Antigens derived from pathogens known to predispose to certain cancers may also be advantageously used in the present invention. Pathogens of particular interest for use in the cancer vaccines provided herein include the hepatitis B virus (hepatocellular carcinoma), hepatitis C virus (heptomas), Epstein Barr virus (EBV) (Burkitt lymphoma, nasopharynx cancer, PTLD in immunosuppressed individuals), HTLVL (adult T cell leukemia), oncogenic human papilloma viruses types 16, 18, 33, 45 (adult cervical cancer), and the bacterium Helicobacter pylori (B cell gastric lymphoma). Other medically relevant microorganisms that may serve as antigens in mammals and more particularly humans are described extensively in the literature, e.g., C. G. A Thomas, Medical Microbiology, Bailliere Tindall, (1983).

[0361] Exemplary viral pathogens include, but are not limited to, infectious virus that infect mammals, and more particularly humans. Examples of infectious virus include, but are not limited to: Retroviridae (e.g., human immunodeficiency viruses, such as HIV-1 (also referred to as HTLV-III, LAV or HTLV-III/LAV, or HIV-III; and other isolates, such as HIV-LP; Picornaviridae (e.g. polio viruses, hepatitis A virus; enteroviruses, human Coxsackie viruses, rhinoviruses, echoviruses); Calciviridae (e.g. strains that cause gastroenteritis); Togaviridae (e.g. equine encephalitis viruses, rubella viruses); Flaviridae (e.g. dengue viruses, encephalitis viruses, yellow fever viruses); Coronoviridae (e.g. coronaviruses such as the SARS coronavirus); Rhabdoviradae (e.g. vesicular stomatitis viruses, rabies viruses); Filoviridae (e.g. ebola viruses); Paramyxoviridae (e.g. parainfluenza viruses, mumps virus, measles virus, respiratory syncytial virus); Orthomyxoviridae (e.g. influenza viruses); Bungaviridae (e.g. Hantaan viruses, bunga viruses, phleboviruses and Nairo viruses); Arena viridae (hemorrhagic fever viruses); Reoviridae (e.g. reoviruses, orbiviurses and rotaviruses); Birnaviridae; Hepadnaviridae (Hepatitis B virus); Parvovirida (parvoviruses); Papovaviridae (papilloma viruses, polyoma viruses); Adenoviridae (most adenoviruses); Herpesviridae herpes simplex virus (HSV) 1 and 2, varicella zoster virus, cytomegalovirus (CMV), herpes virus; Poxyiridae (variola viruses, vaccinia viruses, pox viruses); and Iridoviridae (e.g. African swine fever virus); and unclassified viruses (e.g. the etiological agents of Spongiform encephalopathies, the agent of delta hepatitis (thought to be a defective satellite of hepatitis B virus), the agents of non-A, non-B hepatitis (class 1=internally transmitted; class 2=parenterally transmitted (i.e. Hepatitis C); Norwalk and related viruses, and astroviruses).

[0362] Also, gram negative and gram positive bacteria may be targeted by the subject compositions and methods in vertebrate animals. Such gram positive bacteria include, but are not limited to Pasteurella sp., Staphylococci sp., and Streptococcus sp. Gram negative bacteria include, but are not limited to, Escherichia coli, Pseudomonas sp., and Salmonella sp. Specific examples of infectious bacteria include but are not limited to: Helicobacter pyloris, Borella burgdorferi, Legionella pneumophilia, Mycobacteria sp. (e.g. M. tuberculosis, M avium, M intracellulare, M kansaii, M gordonae), Staphylococcus aureus, Neisseria gonorrhoeae, Neisseria meningitidis, Listeria monocytogenes, Streptococcus pyogenes (Group A Streptococcus), Streptococcus agalactiae (Group B Streptococcus), Streptococcus (viridans group), Streptococcus faecalis, Streptococcus bovis, Streptococcus (anaerobic sps.), Streptococcus pneumoniae, pathogenic Campylobacter sp., Enterococcus sp., Haemophilus infuenzae, Bacillus antracis, Corynebacterium diphtheriae, Corynebacterium sp., Erysipelothrix rhusiopathiae, Clostridium perfringens, Clostridium tetani, Enterobacter aerogenes, Klebsiella pneumoniae, Pasturella multocida, Bacteroides sp., Fusobacterium nucleatum, Streptobacillus moniliformis, Treponema pallidium, Treponema pertenue, Leptospira, Rickettsia, and Actinomyces israelli.

[0363] Polypeptides of bacterial pathogens which may find use as sources of antigen in the subject compositions include but are not limited to an iron-regulated outer membrane protein, (“IROMP”), an outer membrane protein (“OMP”), and an A-protein of Aeromonis salmonicida which causes furunculosis, p57 protein of Renibacterium salmoninarum which causes bacterial kidney disease (“BIND”), major surface associated antigen (“msa”), a surface expressed cytotoxin (“mpr”), a surface expressed hemolysin (“ish”), and a flagellar antigen of Yersiniosis; an extracellular protein (“ECP”), an iron-regulated outer membrane protein (“IROMP”), and a structural protein of Pasteurellosis; an OMP and a flagellar protein of Vibrosis anguillarum and V. ordalii; a flagellar protein, an OMP protein, aroA, and purA of Edwardsiellosis ictaluri and E. tarda; and surface antigen of Ichthyophthirius; and a structural and regulatory protein of Cytophaga columnari; and a structural and regulatory protein of Rickettsia. Such antigens can be isolated or prepared recombinantly or by any other means known in the art.

[0364] Examples of pathogens further include, but are not limited to, infectious fungi and parasites that infect mammals, and more particularly humans. Examples of infectious fungi include, but are not limited to: Cryptococcus neoformans, Histoplasma capsulatum, Coccidioides immitis, Blastomyces dermatitidis, Chlamydia trachomatis, and Candida albicans.

[0365] Examples of parasites include intracellular parasites and obligate intracellular parasites. Examples of parasites include but are not limited to Plasmodium falciparum, Plasmodium ovale, Plasmodium malariae, Plasmdodium vivax, Plasmodium knowlesi, Babesia microti, Babesia divergens, Trypanosoma cruzi, Toxoplasma gondii, Trichinella spiralis, Leishmania major, Leishmania donovani, Leishmania braziliensis, Leishmania tropica, Trypanosoma gambiense, Trypanosoma rhodesiense, Wuchereria bancrofti, Brugia malayi, Brugia timori, Ascaris lumbricoides, Onchocerca volvulus and Schistosoma mansoni.

[0366] Other medically relevant microorganisms that serve as antigens in mammals and more particularly humans are described extensively in the literature, e.g., see C. G. A Thomas, Medical Microbiology, Bailliere Tindall, (1983). In addition to the treatment of infectious human diseases and human pathogens, the compositions and methods of the present invention are useful for treating infections of nonhuman mammals. Exemplary non-human pathogens include, but are not limited to, mouse mammary tumor virus (“MMTV”), Rous sarcoma virus (“RSV”), avian leukemia virus (“ALV”), avian myeloblastosis virus (“AMV”), murine leukemia virus (“MLV”), feline leukemia virus (“FeLV”), murine sarcoma virus (“MSV”), gibbon ape leukemia virus (“GALV”), spleen necrosis virus (“SNV”), reticuloendotheliosis virus (“RV”), simian sarcoma virus (“SSV”), Mason-Pfizer monkey virus (“MPMV”), simian retrovirus type 1 (“SRV-1”), lentiviruses such as HIV-1, SIV, Visna virus, feline immunodeficiency virus (“FIV”), and equine infectious anemia virus (“EIAV”), T-cell leukemia viruses such as HTLV-1, HTLV-II, simian T-cell leukemia virus (“STLV”), and bovine leukemia virus (“BLV”), and foamy viruses such as human foamy virus (“HFV”), simian foamy virus (“SFV”) and bovine foamy virus (“BFV”).

### Detectable Labels

[0367] Compounds useful for the invention may be employed in a range of detection systems. For example, the compound may be used in methods for imaging an internal region of a subject and/or diagnosing the presence or absence of a disease in a subject.

[0368] It will be apparent to those skilled in the art that the diagnostic, prognostic and/or monitoring methods of the present invention involve a degree of quantification to determine levels of 5B6, 5B6 expressing cells, ligand and/or ligand expressing cells present in patient samples. Such quantification is readily provided by the inclusion of appropriate control samples.

[0369] Preferably, internal controls are included in the methods of the present invention. A preferred internal control is one or more samples taken from one or more healthy individuals.

[0370] Compounds useful for the present invention when used diagnostically may be linked to a diagnostic reagent such as a detectable label to allow easy detection of binding events in vitro or in vivo. Suitable labels include radioisotopes, or non-radioactive labels such as biotin, enzymes, chemiluminescent molecules, fluorophores, dye markers or other imaging reagents for detection and/or localisation of target molecules. Alternatively, a second labelled antibody or avidin (for example) which binds the compound can be used for detection.

[0371] In the case of an enzyme immunoassay, an enzyme can be conjugated to the second antibody, generally by means of glutaraldehyde or periodate. As will be readily recognized, however, a wide variety of different conjugation techniques exist, which are readily available to the skilled artisan. Commonly used enzymes include horseradish peroxidase, glucose oxidase, β-galactosidase and alkaline phosphatase, amongst others. The substrates to be used with the specific enzymes are generally chosen for the production, upon hydrolysis by the corresponding enzyme, of a detectable color change. Examples of suitable enzymes include alkaline phosphatase and peroxidase. It is also possible to employ fluorogenic substrates, which yield a fluorescent product rather than the chromogenic substrates noted above.

[0372] In another example, fluorescent compounds, such, as but not limited to fluorecein and rhodamine amongst others, may be chemically coupled to, for examples, antibodies without altering their binding capacity. When activated by illumination with light of a particular wavelength, the fluorochrome-labelled ‘antibody adsorbs the light energy, inducing a state to excitability in’ the molecule, followed by emission of the light at a characteristic color visually detectable with a light microscope.

[0373] By further way of non-limiting example, the compounds coupled to imaging agents can be used in the detection of 5B6 or ligand expression in histochemical tissue sections. The compound may be covalently or non-covalently coupled to a suitable supermagnetic, paramagnetic, electron dense, chogenic, radioactive, or non-radioactive labels such as biotin or avidin.

### Labelled Cell Detection and Isolation

[0374] Cells with a disrupted cell membrane, cells infected with a pathogen, dying cells or dead cells can be detected in a sample by a variety of techniques well known in the art, including cell sorting, especially fluorescence-activated cell sorting (FACS), by using an affinity reagent bound to a substrate (e.g., a plastic surface, as in panning), or by using an affinity reagent bound to a solid phase particle which can be isolated on the basis of the properties of the beads (e.g., colored latex beads or magnetic particles). Naturally, the procedure used to detect the cells will depend upon how the cells have been labelled.

[0375] In one example, any detectable substance which has the appropriate characteristics for the cell sorter may be used (e.g., in the case of a fluorescent dye, a dye which can be excited by the sorter's light source, and an emission spectra which can be detected by the cell sorter's detectors). In flow cytometry, a beam of laser light is projected through a liquid stream that contains cells, or other particles, which when struck by the focussed light give out signals which are picked up by detectors. These signals are then converted for computer storage and data analysis, and can provide information about various cellular properties. Cells labelled with a suitable dye are excited by the laser beam, and emit light at characteristic wavelengths. This emitted light is picked up by detectors, and these analogue signals are converted to digital signals, allowing for their storage, analysis and display.

[0376] Many larger flow cytometers are also “cell sorters”, such as fluorescence-activated cell sorters (FACS), and are instruments which have the ability to selectively deposit cells from particular populations into tubes, or other collection vessels. In a particularly preferred embodiment, the cells are isolated using FACS. This procedure is well known in the art and described by, for example, Melamed et al., Flow Cytometry and Sorting, Wiley-Liss, Inc., (1990); Shapiro, Practical Flow Cytometry, 4th Edition, Wiley-Liss, Inc., (2003); and Robinson et al., Handbook of Flow Cytometry Methods, Wiley-Liss, Inc. (1993).

[0377] In order to sort cells, the instruments electronics interprets the signals collected for each cell as it is interrogated by the laser beam and compares the signal with sorting criteria set on the computer. If the cell meets the required criteria, an electrical charge is applied to the liquid stream which is being accurately broken into droplets containing the cells. This charge is applied to the stream at the precise moment the cell of interest is about to break off from the stream, then removed when the charged droplet has broken from the stream. As the droplets fall, they pass between two metal plates, which are strongly positively or negatively charged. Charged droplets get drawn towards the metal plate of the opposite polarity, and deposited in the collection vessel, or onto a microscope slide, for further examination.

[0378] The cells can automatically be deposited in collection vessels as single cells or as a plurality of cells, e.g. using a laser, e.g. an argon laser (488 nm) and for example with a Flow Cytometer fitted with an Autoclone unit (Coulter EPICS Altra, Beckman-Coulter, Miami, Fla., USA). Other examples of suitable FACS machines useful for the methods of the invention include, but are not limited to, MoFlo™ High-speed cell sorter (Dako-Cytomation ltd), FACS Aria™ (Becton Dickinson), FACS Diva (Becton Dickinson), ALTRA™ Hyper sort (Beckman Coulter) and CyFlow™ sorting system (Partec GmbH).

[0379] For the detection of cells with a disrupted cell membrane, cells infected with a pathogen, dying cells or dead cells from a sample using solid-phase particles, any particle with the desired properties may be utilized. For example, large particles (e.g., greater than about 90-100 μm in diameter) may be used to facilitate sedimentation. Preferably, the particles are “magnetic particles” (i.e., particles which can be collected using a magnetic field). Labelled cells are retained in the column (held by the magnetic field), whilst unlabelled cells pass straight through and are eluted at the other end. Magnetic particles are now commonly available from a variety of manufacturers including Dynal Biotech (Oslo, Norway) and Milteni Biotech GmbH (Germany). An example of magnetic cell sorting (MACS) is provided by Al-Mufti et al. (1999).

[0380] Laser-capture microdissection can also be used to selectively detect labelled cells on a slide using methods of the invention. Methods of using laser-capture microdissection are known, in the art (see, for example, U.S. 20030227611 and Bauer et al., 2002).

### Labelled Dendritic Cell or Precursor Thereof Detection and Isolation

[0381] As used herein, the terms “enriching” and “enriched” are used in their broadest sense to encompass the isolation of dendritic cells or precursors thereof such that the relative concentration of dendritic cells or precursors thereof to non-dendritic cells or precursors thereof in the treated sample is greater than a comparable untreated sample. Preferably, the enriched dendritic cells and/or precursors thereof are separated from at least 10%, more preferably at least 20%, more preferably at least 30%, more preferably at least 40%, more preferably at least 50%, more preferably at least 60%, more preferably at least 70%, more preferably at least 75%, more preferably at least 80%, more preferably at least 90%, more preferably at least 95%, and even more preferably at least 99% of the non-dendritic cells or precursors thereof in the sample obtained from the original sample. Most preferably, the enriched cell population contains no non-dendritic cells or precursors thereof (namely, pure). The terms “enrich” and variations thereof are used interchangeably herein with the term “isolate” and variations thereof. Furthermore, a population of cells enriched using a method of the invention may only comprise a single dendritic cell or precursor thereof. In addition, the enrichment methods of the invention may be used to isolate a single dendritic cell or precursor thereof.

[0382] Dendritic cells or precursors thereof can be enriched from the sample by a variety of techniques well known in the art, including cell sorting, especially fluorescence-activated cell sorting (FACS), by using an affinity reagent bound to a substrate (e.g., a plastic surface, as in panning), or by using an affinity reagent bound to a solid phase particle which can be isolated on the basis of the properties of the beads (e.g., colored latex beads or magnetic particles). Naturally, the procedure used to enrich the dendritic cells and/or precursors thereof will depend upon how the cells have been labelled.

[0383] In one example, any detectable substance which has the appropriate characteristics for the cell sorter may be used (e.g., in the case of a fluorescent dye, a dye which can be excited by the sorter's light source, and an emission spectra which can be detected by the cell sorter's detectors). In flow cytometry, a beam of laser light is projected through a liquid stream that contains cells, or other particles, which when struck by the focussed light give out signals which are picked up by detectors. These signals are then converted for computer storage and data analysis, and can provide information about various cellular properties. Cells labelled with a suitable dye are excited by the laser beam, and emit light at characteristic wavelengths. This emitted light is picked up by detectors, and these analogue signals are converted to digital signals, allowing for their storage, analysis and display.

[0384] Many larger flow cytometers are also “cell sorters”, such as fluorescence-activated cell sorters (FACS), and are instruments which have the ability to selectively deposit cells from particular populations into tubes, or other collection vessels. In a particularly preferred embodiment, the cells are isolated using FACS. This procedure is well known in the art and described by, for example, Melamed et al., Flow Cytometry and Sorting, Wiley-Liss, Inc., (1990); Shapiro, Practical Flow Cytometry, 4th Edition, Wiley-Liss, Inc., (2003); and Robinson et al., Handbook of Flow Cytometry Methods, Wiley-Liss, Inc. (1993).

[0385] In order to sort cells, the instruments electronics interprets the signals collected for each cell as it is interrogated by the laser beam and compares the signal with sorting criteria set on the computer. If the cell meets the required criteria, an electrical charge is applied to the liquid stream which is being accurately broken into droplets containing the cells. This charge is applied to the stream at the precise moment the cell of interest is about to break off from the stream, then removed when the charged droplet has broken from the stream. As the droplets fall, they pass between two metal plates, which are strongly positively or negatively charged. Charged droplets get drawn towards the metal plate of the opposite polarity, and deposited in the collection vessel, or onto a microscope slide, for further examination.

[0386] The cells can automatically be deposited in collection vessels as single cells or as a plurality of cells, e.g. using a laser, e.g. an argon laser (488 nm) and for example with a Flow Cytometer fitted with an Autoclone unit (Coulter EPICS Altra, Beckman-Coulter, Miami, Fla., USA). Other examples of suitable FACS machines useful for the methods of the invention include, but are not limited to, MoFlo™ High-speed cell sorter (Dako-Cytomation ltd), FACS Aria™ (Becton Dickinson), FACS Diva (Becton Dickinson), ALTRA™ Hyper sort (Beckman Coulter) and CyFlow™ sorting system (Partec GmbH).

[0387] The enrichment of dendritic cells and/or or precursors thereof from a sample using solid-phase particles, any particle with the desired properties may be utilized. For example, large particles (e.g., greater than about 90-100 μm in diameter) may be used to facilitate sedimentation. Preferably, the particles are “magnetic particles” (i.e., particles which can be collected using a magnetic field). Labelled cells are retained in the column (held by the magnetic field), whilst unlabelled cells pass straight through and are eluted at the other end. Magnetic particles are now commonly available from a variety of manufacturers including Dynal Biotech (Oslo, Norway) and Milteni Biotech GmbH (Germany). An example of magnetic cell sorting (MACS) is provided by Al-Mufti et al. (1999).

[0388] Laser-capture microdissection can also be used to selectively enrich labelled dendritic cells or precursors thereof on a slide using methods of the invention. Methods of using laser-capture microdissection are known in the art (see, for example, U.S. 20030227611 and Bauer et al., 2002).

[0389] Following enrichment, the cells can be used immediately or cultured in vitro to expand dendritic cells and/or precursors thereof numbers using techniques known in the art. Furthermore, dendritic cell precursors can be cultured to produce Mature dendritic cells.

Identification of Compounds that Bind 5B6 Ligands

[0390] Methods of screening test compounds are described which can identify a compound that binds to 5B6 ligands such as spectrin or RNF41, and are thus useful in a method of the invention.

[0391] Inhibitors of 5B6 ligand activity are screened by resort to assays and techniques useful in identifying drugs capable of binding to the ligand and thereby inhibiting its biological activity. Such assays include the use of mammalian cell lines (for example, CHO cells or 293T cells) for phage display system for expressing the ligand and using a culture of transfected mammalian or E. coli or other microorganism to produce the proteins for binding studies of potential binding compounds.

[0392] As another example, a method for identifying compounds which specifically bind to a 5B6 ligand can include simply the steps of contacting a selected cell expressing the ligand with a test compound to permit binding of the test compound to the ligand, and determining the amount of test compound, if any, which is bound to the ligand. Such a method involves the incubation of the test compound and the ligand immobilized on a solid support. Typically, the surface containing the immobilized compound is permitted to come into contact with a solution containing the protein and binding is measured using an appropriate detection system. Suitable detection systems are known in the art, some of which are described herein.

[0393] Computer modeling and searching technologies permit identification of compounds that can bind 5B6 ligand. The three dimensional geometric structure of the 5B6 ligand, or the active site thereof can be determined. This can be done by known methods, including X-ray crystallography, which can determine a complete molecular structure.

[0394] Methods of computer based numerical modeling can be used to complete the structure (e.g., in embodiments wherein an incomplete or insufficiently accurate structure is determined) or to improve its accuracy. Any method recognized in the art may be used, including, but not limited to, parameterized models specific to particular biopolymers such as proteins or nucleic acids, molecular dynamics models based on computing molecular motions, statistical mechanics models based on thermal ensembles, or combined models.

[0395] The three-dimensional structure of a 5B6 ligand can be used to identify antagonists or agonists through the use of computer modeling using a docking program such as GRAM, DOCK, or AUTODOCK (Dunbrack et al., 1997). Computer programs can also be employed to estimate the attraction, repulsion, and steric hindrance of a candidate compound to the polypeptide. Generally the tighter the fit (e.g., the lower the steric hindrance, and/or the greater the attractive force) the more potent the potential agonist or antagonist will be since these properties are consistent with a tighter binding constant. Furthermore, the more specificity in the design of a potential agonist or antagonist the more likely that it will not interfere with other proteins.

[0396] Initially a potential compound could be obtained, for example, by screening a random peptide library produced by a recombinant bacteriophage or a chemical library. A compound selected in this manner could be then be systematically modified by computer modeling programs until one or more promising potential compounds are identified.

[0397] Such computer modeling allows the selection of a finite number of rational chemical modifications, as opposed to the countless number of essentially random chemical modifications that could be made, and of which any one might lead to a useful agonist or antagonist. Each chemical modification requires additional chemical steps, which while being reasonable for the synthesis of a finite number of compounds, quickly becomes overwhelming if all possible modifications needed to be synthesized. Thus through the use of the three-dimensional structure and computer modeling, a large number of these compounds can be rapidly screened on the computer monitor screen, and a few likely candidates can be determined without the laborious synthesis of untold numbers of compounds.

[0398] For most types of models, standard molecular force fields, representing the forces between constituent atoms and groups, are necessary, and can be selected from force fields known in physical chemistry. Exemplary forcefields that are known in the art and can be used in such methods include, but are not limited to, the Constant Valence Force Field (CVFF), the AMBER force field and the CHARM force field. The incomplete or less accurate experimental structures can serve as constraints on the complete and more accurate structures computed by these modeling methods.

[0399] Further examples of molecular modeling systems are the CHARMm and QUANTA programs (Polygen Corporation, Waltham, Mass.). CHARMm performs the energy minimization and molecular dynamics functions. QUANTA performs the construction, graphic modelling and analysis of molecular structure. QUANTA allows interactive construction, modification, visualization, and analysis of the behaviour of molecules with each other.

Diseases Associated with Cells with a Disrupted Cell Membrane, Cells Infected with a Pathogen, Dying Cells or Dead Cells

[0400] Examples of the diseases associated with cells with a disrupted cell membrane, cells infected with a pathogen, dying cells or dead cells include, but are not necessarily limited to, the following:

[0401] 1) Diseases in which apoptosis is induced in response to a signal generated by a cell of an immune system responsible for biophylaxis, for example, graft versus host disease (GVHD) and autoimmune diseases (systemic lupus erythematosus (SLE), rheumatoid arthritis (RA), scleroderma, Sjogren's syndrome, multiple sclerosis, insulin dependent diabetes mellitus, ulcerative colitis).

[0402] 2) Diseases in which cell death is induced by viral infection or apoptosis is induced by reaction of a cell of an immune system with a cell infected by a virus or parasitic infection, for example, virus associated hemophagocytic syndrome (VAHS) and other viral infections (HCV, HIV, influenza virus).

[0403] 3) Diseases in which cell death is induced by an abnormal apoptosis signal, for example, neurodegenerative diseases (Alzheimer's disease, Parkinson's disease).

[0404] 4) Leukemia, for example, acute lymphatic leukemia.

[0405] 5) Diseases in which apoptosis is artificially induced by, for example, radiation exposure or medication (anticancer drug etc.)

[0406] 6) Systemic inflammatory reaction syndrome (SIRS), diseases in which organ disorder occurs because the immune system is nonspecifically activated in response to invasion to a living body and thus control of cytokine production becomes impossible (HPS, severe pancreatitis).

[0407] 7) Diseases where there is a lack of cell death such as cancer.

[0408] 8) Injury, particularly post-injury recovery.

[0409] Cell death progressing in a living body can be determined using the present invention, and hence progress of these diseases can be monitored. In particular, the invention is useful for GVHD, human immunodeficiency virus (HIV), hemophagocytic syndrome (HPS), especially virus associated hemophagocytic syndrome (VAHS), acute lymphatic leukemia, influenza encephalitis, encephalopathy, and malaria.

### Polypeptides

[0410] The terms “polypeptide” and “protein” are generally used interchangeably and refer to a single polypeptide chain which may or may not be modified by addition of non-amino acid groups. It would be understood that such polypeptide chains may associate with other polypeptides or proteins or other molecules such as co-factors. The terms “proteins” and “polypeptides” as used herein also include variants, mutants, biologically active fragments, modifications, analogous and/or derivatives of the polypeptides described herein.

[0411] The % identity of a polypeptide is determined by GAP (Needleman and Wunsch, 1970) analysis (GCG program) with a gap creation penalty=5, and a gap extension penalty=0.3. The query sequence is at least 25 amino acids in length, and the GAP analysis aligns the two sequences over a region of at least 25 amino acids. More preferably, the query sequence is at least 50 amino acids in length, and the GAP analysis aligns the two sequences over a region of at least 50 amino acids. More preferably, the query sequence is at least 100 amino acids in length and the GAP analysis aligns the two sequences over a region of at least 100 amino acids. Even more preferably, the query sequence is at least 200 amino acids in length and the GAP analysis aligns the two sequences over a region of at least 200 amino acids. Even more preferably, the GAP analysis aligns the two sequences over their entire length.

[0412] As used herein a “biologically active fragment” is a portion of a polypeptide as described herein which maintains a defined activity of the full-length polypeptide. Biologically active fragments can be any size as long as they maintain the defined activity. Preferably, biologically active fragments are at least 100 amino acids in length. With regard to ligands of 5B6 such as spectrin and RN41, a preferred biological activity is the binding to Clec9A.

[0413] In an embodiment, a second polypeptide comprising an amino acid sequence which is at least 50% identical to any one or more of SEQ ID NO's 1 to 8 is, or comprises, a biologically active and/or soluble fragment of one of SEQ ID NO's 1 to 8. As used herein, a “soluble fragment” refers to a portion of a polypeptide which is lacking a membrane spanning region. In a preferred embodiment, the soluble fragment does not comprise at least the about 40, at least about 50, at least about 55, or at least about 100, N-terminal residues of any one of SEQ ID NO's 1 to 8. In a further preferred embodiment, the soluble fragment comprises the C-type lectin-like domain of a polypeptide which comprises:

[0414] i) an amino acid sequence as provided in any one of SEQ ID NO's 1 to 8; or

[0415] ii) an amino acid sequence which is at least 50% identical to any one or more of SEQ ID NO's 1 to 8. In a further embodiment, the soluble fragment comprises:

[0416] i) an amino acid sequence as provided in any one of SEQ ID NO's 40 to 47; or ii) an amino acid sequence which is at least 50% identical to any one or more of SEQ ID NO's 40 to 47,

[0417] wherein the soluble fragment does not comprise at least the about 40 N-terminal residues of anyone of SEQ ID NO's 1 to 8.

[0418] With regard to a defined polypeptide, it will be appreciated that % identity figures higher than those provided above will encompass preferred embodiments. Thus, where applicable, in light of the minimum % identity figures, it is preferred that the polypeptide comprises an amino acid sequence which is at least 50%, more preferably at least 55%, more preferably at least 60%, more preferably at least 65%, more preferably at least 70%, more preferably at least 75%, more preferably at least 80%, more preferably at least 85%, more preferably at least 90%, more preferably at least 91%, more preferably at least 92%, more preferably at least 93%, more preferably at least 94%, more preferably at least 95%, more preferably at least 96%, more preferably at least 97%, more preferably at least 98%, more preferably at least 99%, more preferably at least 99.1%, more preferably at least 99.2%, more preferably at least 99.3%, more preferably at least 99.4%, more preferably at least 99.5%, more preferably at least 99.6%, more preferably at least 99.7%, more preferably at least 99.8%, and even more preferably at least 99.9% identical to the relevant nominated SEQ ID NO.

[0419] Amino acid sequence mutants of a polypeptide described herein can be prepared by introducing appropriate nucleotide changes into a nucleic acid defined herein, or by in vitro synthesis of the desired polypeptide. Such mutants include, for example, deletions, insertions or substitutions of residues within the amino acid sequence. A combination of deletion, insertion and substitution can be made to arrive at the final construct, provided that the final polypeptide product possesses the desired characteristics.

[0420] Mutant (altered) polypeptides can be prepared using any technique known in the art. For example, a polynucleotide described herein can be subjected to in vitro mutagenesis. Such in vitro mutagenesis techniques may include sub-cloning the polynucleotide into a suitable vector, transforming the vector into a “mutator” strain such as the E. coli XL-1 red (Stratagene) and propagating the transformed bacteria for a suitable number of generations. In another example, the polynucleotides defined herein are subjected to DNA shuffling techniques as broadly described by Harayama (1998). Products derived from mutated/altered DNA can readily be screened using techniques described herein to determine if they are able to confer the desired phenotype.

[0421] In designing amino acid sequence mutants, the location of the mutation site and the nature of the mutation will depend on characteristic(s) to be modified. The sites for mutation can be modified individually or in series, e.g., by (1) substituting first with conservative amino acid choices and then with more radical selections depending upon the results achieved, (2) deleting the target residue, or (3) inserting other residues adjacent to the located site.

[0422] Amino acid sequence deletions generally range from about 1 to 15 residues, more preferably about 1 to 10 residues and typically about 1 to 5 contiguous residues.

[0423] Substitution mutants have at least one amino acid residue in the polypeptide molecule removed and a different residue inserted in its place. The sites of greatest interest for substitutional mutagenesis include sites identified as important for function. Other sites of interest are those in which particular residues obtained from various strains or species are identical, and/or those in which particular residues obtained from related proteins are identical. These positions may be important for biological activity. These sites, especially those falling within a sequence of at least three other identically conserved sites, are preferably substituted in a relatively conservative manner. Such conservative substitutions are shown in Table 1.

TABLE 1
Exemplary substitutions.

| Original | Exemplary |
|---|---|
| Residue | Substitutions |
| Ala (A) | val; leu; ile; gly |
| Arg (R) | lys |
| Asn (N) | gln; his |
| Asp (D) | glu |
| Cys (C) | ser |
| Gln (Q) | asn; his |
| Glu (E) | asp |
| Gly (G) | pro, ala |
| His (H) | asn; gln |
| Ile (I) | leu; val; ala |
| Leu (L) | ile; val; met; ala; phe |
| Lys (K) | arg |
| Met (M) | leu; phe |
| Phe (F) | leu; val; ala |
| Pro (P) | gly |
| Ser (S) | thr |
| Thr (T) | ser |
| Trp (W) | tyr |
| Tyr (Y) | trp; phe |
| Val (V) | ile; leu; met; phe; ala |

[0424] Furthermore, if desired, unnatural amino acids or chemical amino acid analogues can be introduced as a substitution or addition into a polypeptides described herein. Such amino acids include, but are not limited to, the D-isomers of the common amino acids, 2,4-diaminobutyric acid, α-amino isobutyric acid, 4-aminobutyric acid, 2-aminobutyric acid, 6-amino hexanoic acid, 2-amino isobutyric acid, 3-amino propionic acid, ornithine, norleucine, norvaline, hydroxyproline, sarcosine, citrulline, homocitrulline, cysteic acid, t-butylglycine, t-butylalanine, phenylglycine, cyclohexylalanine, β-alanine, fluoro-amino acids, designer amino acids such as β-methyl amino acids, Cα-methyl amino acids, Nα-methyl amino acids, and amino acid analogues in general.

[0425] Also included within the scope of the invention are the use of polypeptides which are differentially modified during or after synthesis, e.g., by biotinylation, benzylation, glycosylation, acetylation, phosphorylation; amidation, derivatization by known protecting/blocking groups, proteolytic cleavage, linkage to an antibody molecule or other cellular ligand, etc. These modifications may serve to increase the stability and/or bioactivity of the polypeptide.

[0426] Polypeptides described herein can be produced in a variety of ways, including production and recovery of natural polypeptides, production and recovery of recombinant polypeptides, and chemical synthesis of the polypeptides. In one embodiment, an isolated polypeptide of the present invention is produced by culturing a cell capable of expressing the polypeptide under conditions effective to produce the polypeptide, and recovering the polypeptide. A preferred cell to culture is a recombinant cell of the present invention. Effective culture conditions include, but are not limited to, effective media, bioreactor, temperature, pH and oxygen conditions that permit polypeptide production. An effective medium refers to any medium in which a cell is cultured to produce a polypeptide of the present invention. Such medium typically comprises an aqueous medium having assailable carbon, nitrogen and phosphate sources, and appropriate salts, minerals, metals and other nutrients, such as vitamins. Cells of the present invention can be cultured in conventional fermentation bioreactors, tissue culture flasks, shake flasks, test tubes, microtiter dishes, and petri plates. Culturing can be carried out at a temperature, pH and oxygen content appropriate for a recombinant cell. Such culturing conditions are within the expertise of one of ordinary skill in the art.

### Polynucleotides

[0427] The term “polynucleotide” is used interchangeably herein with the term “nucleic acid”.

[0428] The % identity of a polynucleotide is determined by GAP (Needleman and Wunsch, 1970) analysis (GCG program) with a gap creation penalty=5, and a gap extension penalty=0.3. Unless stated otherwise, the query sequence is at least 45 nucleotides in length, and the GAP analysis aligns the two sequences over a region of at least 45 nucleotides. Preferably, the query sequence is at least 150 nucleotides in length, and the GAP analysis aligns the two sequences over a region of at least 150 nucleotides. More preferably, the query sequence is at least 250 nucleotides in length and the GAP analysis aligns the two sequences over a region of at least 250 nucleotides. Even more preferably, the GAP analysis aligns the two sequences over their entire length.

[0429] With regard to the defined polynucleotides, it will be appreciated that % identity figures higher than those provided above will encompass preferred embodiments. Thus, where applicable, in light of the minimum % identity figures, it is preferred that a polynucleotide defined herein comprises a sequence which is at least 50%, more preferably at least 55%, more preferably at least 60%, more preferably at least 65%, more preferably at least 70%, more preferably at least 75%, more preferably at least 80%, more preferably at least 85%, more preferably at least 90%, more preferably at least. 91%, more preferably at least 92%, more preferably at least 93%, more preferably at least 94%, more preferably at least 95%, more preferably at least 96%, more preferably at least 97%, more preferably at least 98%, more preferably at least 99%, more preferably at least 99.1%, more preferably at least 99.2%, more preferably at least 99.3%, more preferably at least 99.4%, more preferably at least 99.5%, more preferably at least 99.6%, more preferably at least 99.7%, more preferably at least 99.8%, and even more preferably at least 99.9% identical to the relevant nominated SEQ ID NO.

[0430] As used herein, the term “hybridizes” refers to the ability of two single stranded nucleic acid molecules being able to form at least a partially double stranded nucleic acid through hydrogen bonding.

[0431] As used herein, the phrase “stringent conditions” refers to conditions under which a polynucleotide, probe, primer and/or oligonucleotide will hybridize to its target sequence, but to no other sequences. Stringent conditions are sequence-dependent and will be different in different circumstances. Longer sequences hybridize specifically at higher temperatures than shorter sequences. Generally, stringent conditions are selected to be about 5° C. lower than the thermal melting point (Tm) for the specific sequence at a defined ionic strength and pH. The Tm is the temperature (under defined ionic strength, pH and nucleic acid concentration) at which 50% of the probes complementary to the target sequence hybridize to the target sequence at equilibrium. Since the target sequences are generally present at excess, at Tm, 50% of the probes are occupied at equilibrium. Typically, stringent conditions will be those in which the salt concentration is less than about 1.0 M sodium ion, typically about 0.01 to 1.0 M sodium ion (or other salts) at pH 7.0 to 8.3 and the temperature is at least about 30° C. for short probes, primers or oligonucleotides (e.g., 10 nt to 50 nt) and at least about 60° C. for longer probes, primers and oligonucleotides.

[0432] Stringent conditions may also be achieved with the addition of destabilizing agents, such as formamide. Stringent conditions are known to those skilled in the art and can be found in Ausubel et al. (supra), 6.3.1-6.3.6, as well as the Examples described herein. Preferably, the conditions are such that sequences at least about 65%, 70%, 75%, 85%, 90%, 95%, 98%, or 99% homologous to each other typically remain hybridized to each other. A non-limiting example of stringent hybridization conditions are hybridization in a high salt buffer comprising 6×SSC, 50 mM Tris-HCl (pH 7.5), 1 mM EDTA, 0.02% PVP, 0.02% Ficoll, 0.02% BSA, and 500 mg/ml denatured salmon sperm DNA at 65° C., followed by one or more washes in 0.2.xSSC, 0.01% BSA at 50° C. In another embodiment, a nucleic acid sequence that is hybridizable to one or more of the nucleic acid molecule comprising the nucleotide sequence of SEQ ID NO's 81 to 113, under conditions of moderate stringency is provided. A non-limiting example of moderate stringency hybridization conditions are hybridization in 6×SSC, 5×Denhardt's solution, 0.5% SDS and 100 mg/ml denatured salmon sperm DNA at 55° C., followed by one or more washes in 1×SSC, 0.1% SDS at 37° C. Other conditions of moderate stringency that may be used are well-known within the art, see, e.g., Ausubel et al. (supra), and Kriegler, Gene Transfer and Expression, A Laboratory Manual, Stockton Press, (1990). In yet another embodiment, a nucleic acid that is hybridizable to the nucleic acid molecule comprising any one or more of the nucleotide sequences of SEQ ID NO's 81 to 113, under conditions of low stringency, is provided. A non-limiting example of low stringency hybridization conditions are hybridization in 35% formamide, 5×SSC, 50 mM Tris-HCl (pH 7.5), 5 mM EDTA, 0.02% PVP, 0.02% Ficoll, 0.2% BSA, 100 mg/ml denatured salmon sperm DNA, 10% (wt/vol) dextran sulfate at 40° C., followed by one or more washes in 2×SSC, 25 mM Tris-HCl (pH 7.4), 5 mM EDTA, and 0.1% SDS at 50° C. Other conditions of low stringency that may be used are well known in the art, see, e.g., Ausubel et al. (supra) and Kriegler (supra).

[0433] Polynucleotides may possess, when compared to naturally occurring molecules, one or more mutations which are deletions, insertions, or substitutions of nucleotide residues. Mutants can be either naturally occurring (that is to say, isolated from a natural source) or synthetic (for example, by performing site-directed mutagenesis on the nucleic acid).

[0434] Usually, monomers of a polynucleotide or oligonucleotide are linked by phosphodiester bonds or analogs thereof to form oligonucleotides ranging in size from a relatively short monomeric units, e.g., 12-18, to several hundreds of monomeric units. Analogs of phosphodiester linkages include: phosphorothioate, phosphorodithioate, phosphoroselenoate, phosphorodiselenoate, phosphoroanilothioate, phosphoranilidate and phosphoramidate.

### Antisense Polynucleotides

[0435] The term “antisense polynucleotide” shall be taken to mean a DNA or RNA, or combination thereof, molecule that is complementary to at least a portion of a specific mRNA molecule encoding a polypeptide and capable of interfering with a post-transcriptional event such as mRNA translation. The use of antisense methods is well known in the art (see for example, G. Hartmann and S. Endres, Manual of Antisense Methodology, Kluwer (1999)). The use of antisense techniques in plants has been reviewed by Bourque, 1995 and Senior, 1998. Bourque, 1995 lists a large number of examples of how antisense sequences have been utilized in plant systems as a method of gene inactivation. She also states that attaining 100% inhibition of any enzyme activity may not be necessary as partial inhibition will more than likely result in measurable change in the system. Senior (1998) states that antisense methods are now a very well established technique for manipulating gene expression.

[0436] An antisense polynucleotide useful for the invention will hybridize to a target polynucleotide under physiological conditions. As used herein, the term “an antisense, polynucleotide which hybridises under physiological conditions” means that the polynucleotide (which is fully or partially single stranded) is at least capable of forming a double stranded polynucleotide with mRNA encoding a protein, such as those provided in any one of SEQ ID NO's 81 to 113 under normal conditions in a cell, preferably a human cell.

[0437] Antisense molecules may include sequences that correspond to the structural genes or for sequences that effect control over the gene expression or splicing event. For example, the antisense sequence may correspond to the targeted coding region of the target gene, or the 5′-untranslated region (UTR) or the 3′-UTR or combination of these. It may be complementary in part to intron sequences, which may be spliced out during or after transcription, preferably only to exon sequences of the target gene. In view of the generally greater divergence of the UTRs, targeting these regions provides greater specificity of gene inhibition.

[0438] The length of the antisense sequence should be at least 19 contiguous nucleotides, preferably at least 50 nucleotides, and more preferably at least 100, 200, 500 or 1000 nucleotides. The full-length sequence complementary to the entire gene transcript may be used. The length is most preferably 100-2000 nucleotides. The degree of identity of the antisense sequence to the targeted transcript should be at least 90% and more preferably 95-100%. The antisense RNA molecule may of course comprise unrelated sequences which may function to stabilize the molecule.

### Catalytic Polynucleotides

[0439] The term catalytic polynucleotide/nucleic acid refers to a DNA molecule or DNA-containing molecule (also known in the art as a “deoxyribozyme”) or an RNA or RNA-containing molecule (also known as a “ribozyme”) which specifically recognizes a distinct substrate and catalyzes the chemical modification of this substrate. The nucleic acid bases in the catalytic nucleic acid can be bases A, C, G, T (and U for RNA).

[0440] Typically, the catalytic nucleic acid contains an antisense sequence for specific recognition of a target nucleic acid, and a nucleic acid cleaving enzymatic activity (also referred to herein as the “catalytic domain”). The types of ribozymes that are particularly useful in this invention are the hammerhead ribozyme (Haseloff and Gerlach, 1988; Perriman et al., 1992) and the hairpin ribozyme (Shippy et al., 1999).

[0441] The ribozymes useful for this invention and DNA encoding the ribozymes can be chemically synthesized using methods well known in the art. The ribozymes can also be prepared from a DNA molecule (that upon transcription, yields an RNA molecule) operably linked to an RNA polymerase promoter, e.g., the promoter for T7 RNA polymerase or SP6 RNA polymerase. When the vector also contains an RNA polymerase promoter operably linked to the DNA molecule, the ribozyme can be produced in vitro upon incubation with RNA polymerase and nucleotides. In a separate embodiment, the DNA can be inserted into an expression cassette or transcription cassette. After synthesis, the RNA molecule can be modified by ligation to a DNA molecule having the ability to stabilize the ribozyme and make it resistant to RNase.

[0442] As with antisense polynucleotides described herein, catalytic polynucleotides useful for the invention should also be capable of hybridizing a target nucleic acid molecule (for example an mRNA encoding any polypeptide provided in SEQ ID NO's 81 to 113) under “physiological conditions”, namely those conditions within a cell (especially conditions in an animal cell such as a human cell).

### RNA Interference

[0443] RNA interference (RNAi) is particularly useful for specifically inhibiting the production of a particular protein. Although not wishing to be limited by theory, Waterhouse et al. (1998) have provided a model for the mechanism by which dsRNA (duplex RNA) can be used to reduce protein production. This technology relies on the presence of dsRNA molecules that contain a sequence that is essentially identical to the mRNA of the gene of interest or part thereof, in this case an mRNA encoding a polypeptide according to the invention. Conveniently, the dsRNA can be produced from a single promoter in a recombinant vector or host cell, where the sense and anti-sense sequences are flanked by an unrelated sequence which enables the sense and anti-sense sequences to hybridize to form the dsRNA molecule with the unrelated sequence forming a loop structure. The design and production of suitable dsRNA molecules for the present invention is well within the capacity of a person skilled in the art, particularly considering Waterhouse et al. (1998), Smith et al. (2000), WO 99/32619, WO 99/53050, WO 99/49029, and WO 01/34815.

[0444] In one example, a DNA is introduced that directs the synthesis of an at least partly double stranded RNA product(s) with homology to the target gene to be inactivated. The DNA therefore comprises both sense and antisense sequences that, when transcribed into RNA, can hybridize to form the double-stranded RNA region. In a preferred embodiment, the sense and antisense sequences are separated by a spacer region that comprises an intron which, when transcribed into RNA, is spliced out. This arrangement has been shown to result in a higher efficiency of gene silencing. The double-stranded region may comprise one or two RNA molecules, transcribed from either one DNA region or two. The presence of the double stranded molecule is thought to trigger a response from an endogenous plant system that destroys both the double stranded RNA and also the homologous RNA transcript from the target plant gene, efficiently reducing or eliminating the activity of the target gene.

[0445] The length of the sense and antisense sequences that hybridise should each be at least 19 contiguous nucleotides, preferably at least 30 or 50 nucleotides, and more preferably at least 100, 200, 500 or 1000 nucleotides. The full-length sequence corresponding to the entire gene transcript may be used. The lengths are most preferably 100-2000 nucleotides. The degree of identity of the sense and antisense sequences to the targeted transcript should be at least 85%, preferably at least 90% and more preferably 95-100%. The RNA molecule may of course comprise unrelated sequences which may function to stabilize the molecule. The RNA molecule may be expressed under the control of a RNA polymerase II or RNA polymerase III promoter. Examples of the latter include tRNA or snRNA promoters.

[0446] Preferred small interfering RNA (‘siRNA’) molecules comprise a nucleotide sequence that is identical to about 19-21 contiguous nucleotides of the target mRNA. Preferably, the target mRNA sequence commences with the dinucleotide AA, comprises a GC-content of about 30-70% (preferably, 30-60%, more preferably 40-60% and more preferably about 45%-55%), and does not have a high percentage identity to any nucleotide sequence other than the target in the genome of the animal (preferably human) in which it is to be introduced, e.g., as determined by standard BLAST search.

microRNA

[0447] MicroRNA regulation is a clearly specialized branch of the RNA silencing pathway that evolved towards gene regulation, diverging from conventional RNAi/PTGS. MicroRNAs are a specific class of small RNAs that are encoded in gene-like elements organized in a characteristic inverted repeat. When transcribed, microRNA genes give rise to stem-looped precursor RNAs from which the microRNAs are subsequently processed. MicroRNAs are typically about 21 nucleotides in length. The released miRNAs are incorporated into RISC-like complexes containing a particular subset of Argonaute proteins that exert sequence-specific gene repression (see, for example, Millar and Waterhouse, 2005; Pasquinelli et al., 2005; Almeida and Allshire, 2005).

### Cosuppression

[0448] Another molecular biological approach that may be used is co-suppression. The mechanism of co-suppression is not well understood but is thought to involve post-transcriptional gene silencing (PTGS) and in that regard may be very similar to many examples of antisense suppression. It involves introducing an extra copy of a gene or a fragment thereof into a plant in the sense orientation with respect to a promoter for its expression. The size of the sense fragment, its correspondence to target gene regions, and its degree of sequence identity to the target gene are as for the antisense sequences described above. In some instances the additional copy of the gene sequence interferes with the expression of the target plant gene. Reference is made to WO 97/20936 and EP 0465572 for methods of implementing co-suppression approaches.

### Recombinant Vectors

[0449] Recombinant vectors useful for the invention can include at least one polynucleotide molecule described herein, and/or a polynucleotide encoding a polypeptide as described herein, inserted into any vector capable of delivering the polynucleotide molecule into a host cell. Such a vector contains heterologous polynucleotide sequences, that is polynucleotide sequences that are not naturally found adjacent to polynucleotide molecules of the present invention and that preferably are derived from a species other than the species from which the polynucleotide molecule(s) are derived. The vector can be either RNA or DNA, either prokaryotic or eukaryotic, and typically is a transposon (such as described in U.S. Pat. No. 5,792,294), a virus or a plasmid.

[0450] One type of recombinant vector comprises the polynucleotide(s) operably linked to an expression vector. The phrase operably linked refers to insertion of a polynucleotide molecule into an expression vector in a manner such that the molecule is able to be expressed when transformed into a host cell. As used herein, an expression vector is a DNA or RNA vector that is capable of transforming a host cell and of effecting expression of a specified polynucleotide molecule. Preferably, the expression vector is also capable of replicating within the host cell. Expression vectors can be either prokaryotic or eukaryotic, and are typically viruses or plasmids. Expression vectors include any vectors that function (i.e., direct gene expression) in recombinant cells, including in bacterial, fungal, endoparasite, arthropod, animal, and plant cells. Vectors can also be used to produce the polypeptide in a cell-free expression system, such systems are well known in the art.

[0451] “Operably linked” as used herein refers to a functional relationship between two or more nucleic acid (e.g., DNA) segments. Typically, it refers to the functional relationship of transcriptional regulatory element to a transcribed sequence. For example, a promoter is operably linked to a coding sequence, such as a polynucleotide defined herein, if it stimulates or modulates the transcription of the coding sequence in an appropriate host cell and/or in a cell-free expression system. Generally, promoter transcriptional regulatory elements that are operably linked to a transcribed sequence are physically contiguous to the transcribed sequence, i.e., they are cis-acting. However, some transcriptional regulatory elements, such as enhancers, need not be physically contiguous or located in close proximity to the coding sequences whose transcription they enhance.

[0452] In particular, expression vectors contain regulatory sequences such as transcription control sequences, translation control sequences, origins of replication, and other regulatory sequences that are compatible with the recombinant cell and that control the expression of polynucleotide molecules of the present invention. In particular, recombinant molecules of the present invention include transcription control sequences. Transcription control sequences are sequences which control the initiation, elongation, and termination of transcription. Particularly important transcription control sequences are those which control transcription initiation, such as promoter, enhancer, operator and repressor sequences. Suitable transcription control sequences include any transcription control sequence that can function in at least one of the recombinant cells of the present invention. A variety of such transcription control sequences are known to those skilled in the art. Preferred transcription control sequences include those which function in bacterial, yeast, arthropod, nematode, plant or animal cells, such as, but not limited to, tac, lac, trp, trc, oxy-pro, omp/lpp, rrnB, bacteriophage lambda, bacteriophage T7, T7lac; bacteriophage T3, bacteriophage SP6, bacteriophage SP01, metallothionein, alpha-mating factor, Pichia alcohol oxidase, alphavirus subgenomic promoters (such as Sindbis virus subgenomic promoters), antibiotic resistance gene, baculovirus, Heliothis zea insect virus, vaccinia virus, herpesvirus, raccoon poxvirus, other poxvirus, adenovirus, cytomegalovirus (such as intermediate early promoters), simian virus 40, retrovirus, actin, retroviral long terminal repeat, Rous sarcoma virus, heat shock, phosphate and nitrate transcription control sequences as well as other sequences capable of controlling gene expression in prokaryotic or eukaryotic cells.

### Host Cells

[0453] Also useful for certain embodiment of the invention is a recombinant cell comprising a host cell transformed with one or more recombinant molecules described herein or progeny cells thereof. Transformation of a polynucleotide molecule into a cell can be accomplished by any method by which a polynucleotide molecule can be inserted into the cell. Transformation techniques include, but are not limited to, transfection, electroporation, microinjection, lipofection, adsorption, and protoplast fusion. A recombinant cell may remain unicellular or may grow into a tissue, organ or a multicellular organism. Transformed polynucleotide molecules of the present invention can remain extrachromosomal or can integrate into one or more sites within a chromosome of the transformed (i.e., recombinant) cell in such a manner that their ability to be expressed is retained.

[0454] Suitable host cells to transform include any cell that can be transformed with a polynucleotide of the present invention. Host cells of the present invention either can be endogenously (i.e., naturally) capable of producing polypeptides described herein or can be capable of producing such polypeptides after being transformed with at least one polynucleotide molecule as described herein. Host cells of the present invention can be any cell capable of producing at least one protein defined herein, and include bacterial, fungal (including yeast), parasite, nematode, arthropod, animal and plant cells. Examples of host cells include Salmonella, Escherichia, Bacillus, Listeria, Saccharomyces, Spodoptera, Mycobacteria, Trichoplusia, BHK (baby hamster kidney) cells, CHO cells, 293 cells, EL4 cells, MDCK cells, CRFK cells, CV-1 cells, COS (e.g., COS-7) cells, and Vero cells. Further examples of host cells are E. coli, including E. coli K-12 derivatives; Salmonella typhi; Salmonella typhimurium, including attenuated strains; Spodoptera frugiperda; Trichoplusia ni; and non-tumorigenic mouse myoblast G8 cells (e.g., ATCC CRL 1246).

[0455] Recombinant DNA technologies can be used to improve expression of a transformed polynucleotide molecule by manipulating, for example, the number of copies of the polynucleotide molecule within a host cell, the efficiency with which those polynucleotide molecules are transcribed, the efficiency with which the resultant transcripts are translated, and the efficiency of post-translational modifications. Recombinant techniques useful for increasing the expression of polynucleotide molecules of the present invention include, but are not limited to, operatively linking polynucleotide molecules to high-copy number plasmids, integration of the polynucleotide molecule into one or more host cell chromosomes, addition of vector stability sequences to plasmids, substitutions or modifications of transcription control signals (e.g., promoters, operators, enhancers), substitutions or modifications of translational control signals (e.g., ribosome binding sites, Shine-Delgarno sequences), modification of polynucleotide molecules of the present invention to correspond to the codon usage of the host cell, and the deletion of sequences that destabilize transcripts.

### Gene Therapy

[0456] Therapeutic polynucleotide molecules described herein may be employed in accordance with the present invention by expression of such polynucleotides in treatment modalities often referred to as “gene therapy”. For example, polynucleotides encoding a compound of the invention, or a polynucleotide that up-regulates or down-regulates the production of a 5B6 ligand in a cell, may be employed in gene therapy, for example in the treatment of disease and/or modulating an immune response. Thus, cells from a patient may be engineered with a polynucleotide, such as a DNA or RNA, to encode a polypeptide ex vivo. The engineered cells can then be provided to a patient to be treated with the polynucleotide. In this embodiment, cells may be engineered ex vivo, for example, by the use of a retroviral plasmid vector containing RNA encoding a polypeptide described herein can be used to transform, for example, stem cells or differentiated stem cells. Such methods are well-known in the art and their use in the present invention will be apparent from the teachings herein.

[0457] Further, cells may be engineered in vivo for expression of a polypeptide in vivo by procedures known in the art. For example, a polynucleotide encoding a polypeptide as described herein may be engineered for expression in a replication defective retroviral vector or adenoviral vector or other vector (e.g., poxvirus vectors). The expression construct may then be isolated. A packaging cell is transduced with a plasmid vector containing RNA encoding a polypeptide as described herein such as a soluble fragment of human 5B6, such that the packaging cell now produces infectious viral particles containing the gene of interest. These producer cells may be administered to a patient for engineering cells in vivo and expression of the polypeptide in vivo. These and other methods for administering a polypeptide should be apparent to those skilled in the art from the teachings of the present invention.

[0458] Retroviruses from which the retroviral plasmid vectors hereinabove-mentioned may be derived include, but are not limited to, Moloney Murine Leukemia Virus, Spleen Necrosis Virus, Rous Sarcoma Virus, Harvey Sarcoma Virus, Avian Leukosis Virus, Gibbon Ape Leukemia Virus, Human Immunodeficiency Virus, Adenovirus, Myeloproliferative Sarcoma Virus, and Mammary Tumor Virus. In a preferred ° embodiment, the retroviral plasmid vector is derived from Moloney Murine Leukemia Virus.

[0459] Such vectors will include one or more promoters, for expressing the polypeptide. Suitable promoters which may be employed include, but are not limited to, the retroviral LTR; the SV40 promoter; and the human cytomegalovirus (CMV) promoter. Cellular promoters such as eukaryotic cellular promoters including, but not limited to, the histone, RNA polymerase III, the metallothionein promoter, heat shock promoters, the albumin promoter, the 5B6 promoter, human globin promoters and β-actin promoters, can also be used. Additional viral promoters which may be employed include, but are not limited to, adenovirus promoters, thymidine kinase (TK) promoters, and B19 parvovirus promoters. The selection of a suitable promoter will be apparent to those skilled in the art from the teachings contained herein.

[0460] The retroviral plasmid vector can be employed to transduce packaging cell lines to form producer cell lines. Examples of packaging cells which may be transfected include, but are not limited to, the PE501, PA317, Y-2, Y-AM, PA12, T19-14×, VT-19-17-H2, YCRE, YCRIP, GP+E-86, GP+envAm12, and DAN cell lines as described by Miller (1990). The vector may be transduced into the packaging cells through any means known in the art. Such means include, but are not limited to, electroporation, the use of liposomes, and CaPO₄ precipitation. In one alternative, the retroviral plasmid vector may be encapsulated into a liposome, or coupled to a lipid, and then administered to a host.

[0461] The producer cell line will generate infectious retroviral vector particles, which include the nucleic acid sequence(s) encoding the polypeptide (for example). Such retroviral vector particles may then be employed to transduce eukaryotic cells, either in vitro or in vivo. The transduced eukaryotic cells will express the nucleic acid sequence(s) encoding the polypeptide. Eukaryotic cells which may be transduced include, but are not limited to, embryonic stem cells, embryonic carcinoma cells, as well as hematopoietic stem cells, hepatocytes, fibroblasts, myoblasts, keratinocytes, myocytes (particularly skeletal muscle cells), endothelial cells, and bronchial epithelial cells.

[0462] Genetic therapies in accordance with the present invention may involve a transient (temporary) presence of the gene therapy polynucleotide in the patient or the permanent introduction of a polynucleotide into the patient.

[0463] Genetic therapies, like the direct administration of agents discussed herein, in accordance with the present invention may be used alone or in conjunction with other therapeutic modalities.

### Pharmaceutical Compositions, Dosages, and Routes of Administration

[0464] Compositions comprising the compound together with an acceptable carrier or diluent are useful in the methods of the present invention.

[0465] Therapeutic compositions can be prepared by mixing the desired component having the appropriate degree of purity with optional pharmaceutically acceptable carriers, excipients, or stabilizers (Remington's Pharmaceutical Sciences, 16th edition, Osol, A.ed. (1980)), in the form of lyophilized formulations, aqueous solutions or aqueous suspensions. Acceptable carriers, excipients, or stabilizers are preferably nontoxic to recipients at the dosages and concentrations employed, and include buffers such as Tris, HEPES, PIPES, phosphate, citrate, and other organic acids; antioxidants including ascorbic acid and methionine; preservatives (such as octadecyldimethylbenzyl ammonium chloride; hexamethonium chloride; benzalkonium chloride, benzethonium chloride; phenol, butyl or benzyl alcohol; alkyl parabens such as methyl or propyl paraben; catechol; resorcinol; cyclohexanol; 3-pentanol; and m-cresol); low molecular weight (less than about 10 residues) polypeptides; proteins, such as serum albumin, gelatin, or immunoglobulins; hydrophilic polymers such as polyvinylpyrrolidone; amino acids such as glycine, glutamine, asparagine, histidine, arginine, or lysine; monosaccharides, disaccharides, and other carbohydrates including glucose, mannose, or dextrins; sugars such as sucrose, mannitol, trehalose or sorbitol; salt-forming counter-ions such as sodium; and/or non-ionic surfactants such as TWEEN™, PLURONICS™ or polyethylene glycol (PEG).

[0466] Additional examples of such carriers include ion exchangers, alumina, aluminum stearate, lecithin, serum proteins, such as human serum albumin, buffer substances such as glycine, sorbic acid, potassium sorbate, partial glyceride mixtures of saturated vegetable fatty acids, water, salts, or electrolytes such as protamine sulfate, disodium hydrogen phosphate, potassium hydrogen phosphate, sodium chloride, colloidal silica, magnesium trisilicate, polyvinyl pyrrolidone, and cellulose-based substances.

[0467] Therapeutic compositions to be used for in vivo administration should be sterile. This is readily accomplished by filtration through sterile filtration membranes, prior to or following lyophilization and reconstitution. The composition may be stored in lyophilized form or in solution if administered systemically. If in lyophilized form, it is typically formulated in combination with other ingredients for reconstitution with an appropriate diluent at the time for use. An example of a liquid formulation is a sterile, clear, colorless unreserved solution filled in a single-dose vial for subcutaneous injection.

[0468] Therapeutic compositions generally are placed into a container having a sterile access port, for example, an intravenous solution bag or vial having a stopper pierceable by a hypodermic injection needle. The compositions are preferably administered subcutaneously, intramuscularly or parenterally, for example, as intravenous injections or infusions or administered into a body cavity.

[0469] The compound may be administered in an amount of about 0.001 to 2000 mg/kg body weight per dose, and more preferably about 0.01 to 500 mg/kg body weight per dose. Repeated doses may be administered as prescribed by the treating physician.

[0470] Single or multiple administrations of the compositions are administered depending on the dosage and frequency as required and tolerated by the patient. The dosage and frequency will typically vary according to factors specific for each patient depending on the specific therapeutic or prophylactic agents administered, the severity and type of disease or immune response required, the route of administration, as well as age, body weight, response, and the past medical history of the patient. Suitable regimens can be selected by one skilled in the art by considering such factors and by following, for example, dosages reported in the literature and recommended in the Physician's Desk Reference, 56^{th} ed., (2002). Generally, the dose is sufficient to treat or ameliorate symptoms or signs of disease without producing unacceptable toxicity to the patient.

[0471] In another example, a compound useful for the methods of the invention comprises an antigen, such as a cancer or an antigen of a pathogen or infectious organism, and can be delivered by intramuscular, subcutaneous or intravenous injection, or orally, as a vaccine to enhance humoral and/or T cell mediated immune responses. In another example, the antigen is a self antigen or allergenic antigen which can used to diminish immune responses similar to that described for 33D1 and DEC-205 (Bonifaz et al., 2002; Finkelman et al., 1996).

[0472] In another example of the present invention, a radiolabeled form of the is delivered by intravenous injection as a therapeutic agent to target cells that express 5B6 or the 5B6 ligand. Previous examples of radiolabeled antibodies and the methods for their administration to patients as therapeutics are known to those skilled in the art. Examples include Iodine¹³¹ labeled Lym-1, against the β subunit of HLA-DR and the anti-CD20 Indium¹¹¹ and Yttrium⁹⁰ labeled Ibritumomab Tiuxetan (IDEC-Y2B8, ZEVALIN®) and Iodine I 131 Tositumomab (BEXXAR®).

[0473] In one embodiment, the composition does not comprise an adjuvant. In another embodiment, the composition does comprise an adjuvant. Examples of adjuvants include, but are not limited to, aluminium hydroxide, aluminium phosphate, aluminium potassium sulphate (alum), muramyl dipeptide, bacterial endotoxin, lipid X, polyribonucleotides, sodium alginate, lanolin, lysolecithin, vitamin A, saponin, liposomes, levamisole, DEAE-dextran, blocked copolymers or other synthetic adjuvants. Such adjuvants are available commercially from various sources, for example, Merck Adjuvant 65 (Merck and Company, Inc., Rahway, N.J.) or Freund's Incomplete Adjuvant and Complete Adjuvant (Difco Laboratories, Detroit, Mich.).

[0474] In an embodiment, the composition comprises liposomes or membrane vesicles. Examples of such liposomes are described in US 2007/0026057, Leserman (2004) and van Broekhoven et al. (2004). In these instances the compound can be used to target the liposome to enhance the delivery of an agent of interest. As outlined in US 2007/0026047, processes for the preparation of membrane vesicles for use in the invention are described in WO 00/64471.

[0475] Compositions for detection of cells with a disrupted cell membrane, cells infected with a pathogen, dying cells or dead cells, or a portion thereof, modulating an immune response, and/or antigen recognition, processing and/or presentation, are conventionally administered parenterally, by injection, for example, subcutaneously, intramuscularly or intravenously. Additional formulations which are suitable for other modes of administration include suppositories and, in some cases, oral formulations. For suppositories, traditional binders and carriers may include, for example, polyalkylene glycols or triglycerides; such suppositories may be formed from mixtures containing the active ingredient in the range of 0.5% to 10%, preferably 1% to 2%. Oral formulations include such normally employed excipients as, for example, pharmaceutical grades of mannitol, lactose, starch, magnesium stearate, sodium saccharine, cellulose, magnesium carbonate, and the like. These compositions take the form of solutions, suspensions, tablets, pills, capsules, sustained release formulations or powders and contain 10% to 95% of active ingredient, preferably 25% to 70%. Where the composition is lyophilised, the lyophilised material may be reconstituted prior to administration, e.g. as a suspension. Reconstitution is preferably effected in buffer. Capsules, tablets and pills for oral administration to a patient may be provided with an enteric coating comprising, for example, Eudragit “S”, Eudragit “L”, cellulose acetate, cellulose acetate phthalate or hydroxypropylmethyl cellulose.

[0476] In any treatment regimen, the therapeutic composition may be administered to a patient either singly or in a cocktail containing other therapeutic agents, compositions, or the like.

[0477] In an embodiment, the immune response is modulated by using a DNA vaccine encoding a compound of the invention conjugated to an antigen. DNA vaccination involves the direct in vivo introduction of DNA encoding the antigen into tissues of a subject for expression of the antigen by the cells of the subject's tissue. Such vaccines are termed herein “DNA vaccines” or “nucleic acid-based vaccines”. DNA vaccines are described in U.S. Pat. No. 5,939,400, U.S. Pat. No. 6,110,898, WO 95/20660, WO 93/19183, Demangel et al. (2005) and Nchinda et al. (2008).

[0478] To date, most DNA vaccines in mammalian systems have relied upon viral promoters derived from cytomegalovirus (CMV). These have had good efficiency in both muscle and skin inoculation in a number of mammalian species. A factor known to affect the immune response elicited by DNA immunization is the method of DNA delivery, for example, parenteral routes can yield low rates of gene transfer and produce considerable variability of gene expression. High-velocity inoculation of plasmids, using a gene-gun, enhanced the immune responses of mice, presumably because of a greater efficiency of DNA transfection and more effective antigen presentation by dendritic cells. Vectors containing the nucleic acid-based vaccine of the invention may also be introduced into the desired host by other methods known in the art, e.g., transfection, electroporation, microinjection, transduction, cell fusion, DEAE dextran, calcium phosphate precipitation, lipofection (lysosome fusion), or a DNA vector transporter.

[0479] Transgenic plants producing an antigenic polypeptide can be constructed using procedures well known in the art. A number of plant-derived edible vaccines are currently being developed for both animal and human pathogens. Immune responses have also resulted from oral immunization with transgenic plants producing virus-like particles (VLPs), or chimeric plant viruses displaying antigenic epitopes. It has been suggested that the particulate form of these VLPs or chimeric viruses may result in greater stability of the antigen in the stomach, effectively increasing the amount of antigen available for uptake in the gut.

### EXAMPLES

### Example 1

### Cloning and Expression of 5B6

### Materials and Methods

### Mice

[0480] Mice were bred under specific pathogen free conditions at The Walter and Eliza Hall Institute (WEHI). Female mice were used at 6-12 weeks of age; alternatively, gender aged-matched cohorts were generated. Animals were handled according to the guidelines of the National Health and Medical Research Council of Australia. Experimental procedures were approved by the Animal Ethics Committee, WEHI.

### Sequence Identification of 5B6

[0481] Sequencing was performed using the Big Dye Terminator version 3.1 (Applied Biosystems, Victoria, Australia) and 200 ng plasmid DNA, and subjected to electrophoresis on an ABI 3730x1 96-capillary automated DNA sequencer. Comparison of sequences to the expressed sequence tag, cDNA and protein databases was performed by basic local alignment search tool (BLAST) using National Center for Biotechnology Information (www.ncbi.nlm.nih.gov). Genomic localisation was performed by BLAT alignment to the mouse assembly (February 2006) and human assembly (March 2006) using University of California Santa Cruz, Genome Browser (vvww.genome.ucsc.edu/).

### Quantitative RT-PCR

[0482] RNA (up to 1 μg) was DNase treated with RQ1 DNase (Promega) then reverse transcribed into cDNA using random primers (Promega) and Superscript II reverse transcriptase (Gibco BRL, Geithersburg, Md.). Real-time reverse transcription PCR (RT-PCR) was performed to determine the expression of 5B6 and Gapdh in hemopoietic cells using the Quantitect SYBR Green PCR kit (Qiagen) and a Light cycler (Roche, Victoria; Australia). The specific primers for real-time RT-PCR were as follows: 5B6; 5′-TGTGACTGCTCCCACAACTGGA-3′ (SEQ ID NO:17); 5′-TTTGCACCAATCACAGCACAGA-3′ (SEQ ID NO:18), Gapdh; 5′-CATTTGCAGTGGCAAAGTGGAG-3′ (SEQ ID NO:19); 5′-GTCTCGCTCCTGGAAGATGGTG-3′ (SEQ ID NO:20). An initial activation step for 15 min at 95° C. was followed by 40 cycles of: 15s at 94° C. (denaturation), 20-30s at 50-60° C. (annealing) and 10-12s at 72° C. (extension), followed by melting point analysis. The expression level for each gene was determined using a standard curve prepared from 10⁻²-10⁻⁶ pg of specific DNA fragment, and was expressed as a ratio relative to Gapdh.

### Recombinant Surface Expression of 5B6

[0483] Full length mouse and human 5B6 (m5B6 and h5B6) were isolated by PCR amplification from splenic DC cDNA using Advantage cDNA polymerase (Clontech) and the following primers: [5B6: 5′-GCCATTTCTTGTACCAACCTACTCCT-3′(SEQ ID NO:21); 5′-CGGTGTGGTATGGATCGTCACTT-3′ (SEQ ID NO:22)], [HE: 5′-AGCCTCCTGTGTGGACTGCTTT-3′ (SEQ ID NO:23); 5′-TTCATGGCCCACATTTTGGTTT-3′ (SEQ ID NO:24)], and the resultant products were subcloned into pGemT easy plasmid (Promega). m5B6 and h5B6 were expressed on the surface of Chinese hamster ovary (CHO) cells as C-terminal (extracellular) FLAG-tagged proteins and on the surface of mouse EL4 cells as a fusion protein where green fluorescent protein (GFP) was fused to the N-terminal cytoplasmic domain of 5B6. To generate the FLAG tagged proteins, 5B6 encoding cDNA was amplified using Advantage high fidelity polymerase (Clontech), restriction digested with AscI and Mlu-1 and subcloned into a pEF-Bos vector modified to contain the FLAG epitope (kindly donated by Dr T. Willson; WEHI).

[0484] CHO cells were co-transfected with the pEF-Bos-5B6 lectin and a pGK-neo plasmid containing the neomycin phosphotransferase gene by electoporation (Gene Pulsar, Biorad, NSW, Australia) and transfectants selected with 1 mg/ml G418 (Geneticin, Life Technologies). 5B6 lectin-positive cells were stained with a rat anti-FLAG mAb, followed by an anti-rat Ig-PE (Caltag), and then isolated by flow cytometric sorting. GFP-tagged proteins were generated by amplifying the 5B6 lectin encoding cDNA, restriction digesting with EcoRI and subcloning into pEGFP-C2 vector (Clontech), before electroporation into EL4 cells and selection with 1 mg/ml G418. 5B6-positive cells were isolated by flow cytometric sorting of GFP positive cells. Full length untagged proteins were generated by amplifying the 5B6 lectin encoding cDNA, restriction digesting with EcoRI and subcloning into a pIRES-Neo vector, before electroporation into CHO cells and selection with 1 mg/ml G418.

### Generation of mAb Against C-type Lectins

[0485] Wistar rats were immunised three to four times with 50 μg Keyhole Limpet Hemocyanin (KLH)-conjugated peptide: 5B6 mouse peptide (H-DGSSPLSDLLPAERQRSAGQIC-OH) (SEQ ID NO:29), human peptide (H-RWLWQDGSSPSPGLLPAERSQSANQVC-OH) (SEQ ID NO:30), or 1×10⁷ CHO cells expressing 5B6-FLAG at 4 week intervals, and given a final boost 4 days before fusion with Sp2/0 myeloma cells. Hybridomas secreting specific mAb were identified by flow cytometric analysis of supernatants using CHO cells expressing C-type 5B6-FLAG and EL4 cells expressing GFP-5B6. Hybridomas were generated that displayed specific reactivity to each of mouse 5B6 and human 5B6.

[0486] In summary, the following mAb were previously generated and utilised in this study, two rat mAb 24/04-10B4 (from peptide immunisation) and 42/04-42D2 (from CHO-5B6-FLAG immunisation) were raised against mouse 5B6 (m5B6). Two rat antibodies 20/05-3A4 and 23/05-4C6 (from h5B6 peptide immunisation) were raised against h5B6 as described in WO 09/026,660.

### Isolation and Flow Cytometric Analysis of DCs

[0487] DC isolations from lymphoid organs were performed as previously described (Vremec et al., 2000). Briefly, tissues were mechanically chopped, digested with collagenase and DNAse and treated with ethylenediamine tetraacetic acid (EDTA). Low-density cells were enriched by density centrifugation (1.077 g/cm³ Nycodenz, Axis-Shield, Oslo, Norway). Non-DC-lineage cells were coated with mAb (KT3-1.1, anti-CD3; T24/31.7, anti-Thy1; TER119, anti-erythrocytes; ID3, anti-CD19; and 1A8, anti-Ly6G) then removed using anti-rat Ig magnetic beads (Biomag beads, QIAGEN, Victoria, Australia). Blood DCs were enriched by removing red blood cells (RBC) (0.168M NH₄Cl; 5 min at 4° C.) and depletion of irrelevant cells as above, except the mAb cocktail also contained the mAb F4/80. DC-enriched populations were blocked using rat Ig and anti-FcR mAb (2.4G2), then stained with fluorochrome-conjugated mAb against CD11c (N418), CD205 (NLDC-145), CD4 (GK1.5), CD8 (YTS169.4), CD24 (M1/69), 120G8 or CD45RA (14.8), Sirpα (p84) and m5B6 (24/04-10B4-biotin).

[0488] cDCs were selected as CD11c^{hi}CD45RA⁻ or CD11c^{hi}120G8⁻; splenic cDC were further subdivided into CD4⁺cDC (CD c^{hi}CD45RA⁻CD4⁺ CD8), double negative (DN) cDC (CD11c^{hi}CD45RA⁻CD4⁻CD8⁻) and CD8⁺cDC (CD11c^{hi}CD45RA⁻ CD8⁺ CD4⁻); thymic DCs were subdivided into CD8⁻cDC (Sirpα^{hi}CD8^{lo}) and CD8⁺cDC (Sirpα^{lo}CD8^{hi}); and LN cDC were subdivided into CD8⁻cDC (CD11c^{hi}CD205⁻CD8⁻), dermal DC (CD11c⁺CD205^{int}CD8⁻), Langerhans' cells (CD11c⁺CD205^{hi}CD8⁻) and CD8⁺cDC (CD11c⁺CD205^{hi}CD8⁺), as described previously (Lahoud et al., 2006). pDCs were separated as CD11c^{int}CD45RA⁺ or CD11c^{int}120G8⁺. Biotin staining was detected using streptavidin (SA)-phycoerythrin (PE). The expression of m5B6 on the various DC populations was analysed and compared to isotype control staining (IgG2a, BD Pharmingen, San Diego, Calif., USA). Flow cytometric analysis was performed on an LSR II (Becton Dickinson, Franklin Lakes, N.J., USA), excluding autofluorescent and propidium iodide (PI) positive dead cells.

### Isolation and Flow Cytometric Analysis of Human Blood DCs and Hemopoietic Cells

[0489] Peripheral blood mononuclear cells (PBMC) were isolated from human blood using Ficoll-Pacque-PLUS (GE Healthcare, Rydalmere, NSW, Australia) density separation. Blood donors gave with informed consent and collection was approved by Human Research Ethics Committee, Melbourne Health. The PBMC were blocked using rat Ig and anti-FcR mAb (2.4G2) then stained with mAb against HLA-DR (L243; Becton Dickinson), and a cocktail of PE-conjugated mAb against lineage markers, namely CD3 (BW264156; T cells), CD14 (Tuk4; monocytes), CD19 (6D5; B cells) and CD56 (AF12-7H3; NK cells). Blood DCs were gated as HLA-DR^{hi}, lineage⁻ cells and further segregated based on their expression of BDCA-1 (ADJ-8E3), BDCA-3 (AD5-14H2), BDCA-4 (AD5-17F6) and CD16 (VEP13). PBMC were also used as a source of other hemopoietic cells that were isolated using mAb against CD3 (BW264156; T cells), CD19 (6D5; B cells), CD56 (AF12-7H3), and NKp46 (9E2) (CD5.6⁺NKp46⁺; NK cells) and CD14 (Tuk4; monocytes). Staining and flow cytometric analysis for the expression of h5B6 (20/05-3A4) was performed, excluding PI positive dead cells. Unless otherwise specified, all anti-human mAb were purchased Miltenyi Biotec (North Ryde, NSW, Australia).

### Isolation and Analysis of 5B6 on Mouse Hemopoietic Cells

[0490] Spleen cell suspensions were prepared as for DC isolation (Vremec et al., 2000). Cells were stained with mAb against CD3 (KT3-1.1), CD19 (ID3), NK1.1 (PK136), CD49b (Hma2; eBioscience, San Diego, Calif., USA) then B cells (CD19⁺CD3⁻), T cells (CD19⁻CD3⁺) and NK cells (CD49b⁺NK1.1⁺CD3⁻) were selected. Splenic macrophages were first enriched by a 1.082 g/cm³ density centrifugation (Nycodenz) and immunomagnetic bead depletion of CD3⁺ T cells and CD19⁺ B cells; the enriched cells were stained with mAb against CD11b (M1/70) and F4/80, then macrophages were gated as CD11b^{hi}F4/80⁺. Bone marrow macrophages and monocytes were first enriched as for spleen, then stained with CD11b (M1/70) and Ly6C (5075-3.6); monocytes were then gated as side-scatter^{lo}Ly6C^{hi}CD11b^{hi} and macrophages as Ly6C^{int}CD11b^{hi}. All cells were blocked using rat Ig and anti-FcR mAb (2.4G2) before immunofluorescence staining with the various mAb cocktails including anti-5B6 mAb (10B4-biotin). Biotin staining was detected using streptavidin-PE. Samples were analysed for their expression of 5B6 on an LSR II (Becton Dickinson), excluding PI positive dead cells.

### Recombinant Expression of Soluble 5B6

[0491] To generate soluble 5B6, cDNA containing the hinge and ectodomain regions was amplified using Advantage high fidelity 2 polymerase (Clontech) and the following primers [m5B6: 5′-TAGTAGACGCGTGAGCAGCAGGAAAGACTCATC-3′ (SEQ ID NO:25); 5′-TAGTAGACGCGTTCAGATGCAGGATCCAAATGC-3′] (SEQ ID NO:26), [H₅B6:5′-TAGTAGACGCGTCAGCAGCAAGAAAAACTCATC-3′ (SEQ ID NO:27); 5′-TAGTAGACGCGTTCAGACAGAGGATCTCAACGC-3′] (SEQ ID NO:28). The amplified cDNA was restriction digested with Mlu-1 and subcloned into the Mlu-1 site of a pEF-Bos vector modified to contain the biotinylation consensus sequence (a peptide consensus sequence NSGLHHILDAQKMVWNHR (SEQ ID NO:31) recognised specifically by E coli biotin holoenzyme synthetase BirA and the FLAG epitope. The resulting lectin fusion constructs thus' included (in order of N-terminus): the IL3 signal sequence (to ensure secretion), the biotinylation consensus peptide sequence, a FLAG-tag, the hinge region and the lectin domain. Recombinant proteins were expressed by transient transfection of 293T cells (a human renal epithelial cell line stably transfected with polyoma/SV40 large T antigen) in DMEM-10% FCS with 8 micrograms DNA/75 cm2 flask using Fugene. After 8 h, the media was removed, the cells washed twice, then incubated for 36-60 h in 10 ml X-Vivo-10 protein-free/serum-free media (BioWhittaker, Walkersville, Md.). The media containing the secreted recombinant protein was harvested, and recombinant protein from the culture supernatant concentrated 100-fold using a 10,000 mwt cutoff centrifugal device (Nanosep 10K Omega, PALL Life Sciences). The concentrated protein was then used directly or enzymatically biotinylated using BIR enzyme (Avidity, Denver, Colo.).

### Binding Assays to Investigate the Binding of Soluble 5B6 to Membrane Bound 5B6

[0492] 293T cells were transiently transfected with expression constructs encoding full length untagged 5B6 in pIRES Neo. Two-three days later, cells were harvested and surface immunofluorescence labeled using either (1) soluble FLAG-tagged biotinylated m5B6, h5B6 and Cire, and detected with Streptavidin PE, or (2) soluble FLAG-tagged 5B6, biotinylated anti-FLAG mAb 9H10, and Streptavidin-PE. Live cells were gated on forward and side scatter, or by propidium iodide exclusion and analysed for their surface binding of soluble 5B6. The specificity of the binding of soluble 5B6 was demonstrated by comparison to binding to other soluble FLAG-tagged C-type lectins, such as Cire.

### ELISA

[0493] Recombinant soluble protein secretion was assayed by capture/two-site ELISA. Briefly, 96-well polyvinylchloride microtitre plates (Costar, Broadway, Cambridge, UK) were coated with purified capture mAb, namely, anti-FLAG 9H10 12.5 ug/ml (generated in-house). Culture supernatants were detected using the biotinylated anti-m5B6 antibody (24/04-10B4)-(2 ug/ml), Streptavidin-HRP and ABTS substrate. Biotinylated recombinant soluble protein was assayed by capture/two-site ELISA. Briefly, 96-well polyvinylchloride microtitre plates (Costar, Broadway, Cambridge, UK) were coated with purified capture mAb, namely, anti-FLAG 9H10 12.5 ug/ml (generated in-house). Culture supernatants were detected using Streptavidin-HRP and ABTS substrate.

### Results

### Comparison of Gene Expression Patterns Between Splenic DC Subsets

[0494] Gene expression profile analysis identified a murine cDNA clone that is preferentially expressed by the CD8⁺ cDC subset relative to the CD8⁻ cDC. This clone, termed 5B6, represented a fragment of a “hypothetical C-type lectin”, a gene found on chromosome 6, that was differentially expressed in CD8⁺ DC (Riken 9830005G06, (recently named C-type lectin domain family 9, member A, (Clec9a) Genbank accession AK036399.1, Unigene ID Mm.391518). Furthermore, analysis of the public databases revealed a human orthologue for 5B6 (HEEE9341) on chromosome 12, recently renamed CLEC9A. Orthologs have been identified to exist in other animals such as chimpanzees (Genbank accession XP_{—}001143778), Rhesus monkeys (XP_{—}001114857), dogs (Genbank accession XP_{—}854151), cows (XP_{—}873119), horses (XP_{—}001493987) and rats (Genbank accession XP_{—}578403).

### Identification, Characterisation and Cloning of the C-Type Lectins

[0495] The inventors amplified the full-length cDNA encoding mouse and human 5B6 by PCR and sequenced the genes (FIGS. 1A and 1B).

[0496] The full-length coding sequence of mouse 5B6, encoded by 7 exons spanning 13.4 kb of genomic DNA (FIG. 1D), contains a single open reading frame (ORF) (795 bp) encoding a protein of 264 amino acid (aa) (FIG. 1C). Human 5B6 coding sequence, is encoded by 6 exons spanning 12.9 kb of genomic DNA (FIG. 1D), similarly contains a single ORF encoding a protein of 241 aa (FIG. 1C).

[0497] The mouse and human 5B6 gene each encode a putative transmembrane protein with a single C-type lectin domain in its extracellular region, a transmembrane region and a cytoplasmic tail containing the YXXL residues, which is a potential signalling motif (Fuller et al., 2007) (FIG. 1C). Human 5B6 has shorter hinge region than mouse. An alignment of the mouse and human protein sequences is demonstrated in FIG. 1C (53% identical; 69% similar). A schematic representation of the proposed mouse and human 5B6 protein structure is shown in FIG. 1E.

[0498] Using NCBI Blast protein analysis, it was determined that m5B6 shares most sequence similarity with mouse Dectin-1 (Clec7A), Clec12B, and NKG2D, whereas h5B6 is most similar to LOX-1 (Clec8A); Clec12B, and DCAL-2 (Clec12A). The CTLD of 5B6, like the classical C-type lectin the rat mannose binding protein A (MBP-A), has four conserved cysteine residues that form two disulfide bonds (FIG. 2). Furthermore, 5B6 possesses two additional cysteine residues in the neck region allowing protein homodimerization (Weis et al., 1998). Critically, the residues involved in Ca²⁺ binding in classical C-type lectins are not present in mouse and human 5B6 (FIG. 2).

### Expression of C-Type Lectin Genes

[0499] Microarray analysis predicted 5B6 to be expressed at 3.5 fold higher levels in CD8⁺ DC relative to CD8⁻ DC, and at 2.6-fold higher levels in CD8⁺ DC relative to the DN DC. Hence, the inventors designed primers and investigated the expression of 5B6, by quantitative RT-PCR, in mouse splenic cDC subsets. It was confirmed that 5B6 was preferentially expressed by the CD8⁺ cDC; splenic CD8⁺ DC expressed 22-fold more mRNA than splenic CD4⁺ cDC (FIG. 3A).

[0500] The inventors examined the expression of mouse and human 5B6 genes across a panel of hemopoietic cell types by quantitative real-time RT-PCR. 5B6. mRNA expression was specific to DC, both cDC and pDC, with moderate levels of mRNA expression in NK cells (FIG. 3B). It was preferentially expressed in splenic CD8⁺ DC relative to CD8⁻ cDC. It was also differentially expressed in the thymic CD8⁺ cDC and the LN CD8⁺DEC205^{hi} cDC (FIG. 3A). Furthermore, the gene expression in all three splenic cDC populations was reduced 3 h after in vivo activation with CpG and LPS, ligands to Toll like receptor 9 and 4 respectively (FIG. 3C).

### Surface Expression of Mouse 5B6 Protein

[0501] To investigate the protein expression of m5B6 and h5B6, we generated mAbs that recognised protein on the surface of 5B6-transfected cells by flow cytometry. Staining of a panel of freshly isolated mouse hemopoietic cells with the mAb 10B4 indicated that m5B6 was expressed on a subset of cDCs and on most pDCs (FIG. 4A). Strikingly, m5B6 protein was not detected on most other hemopoietic cells investigated, including T cells, most B cells, monocytes and macrophages. Nor was it detected on the NK cells that expressed some mRNA (FIG. 4A). However, a small (3%) proportion of B cells, displayed clear positive staining for m5B6. Only around 3% of bone marrow cells showed any staining with 10B4, and most of this was weak. Thus, in the hemopoietic system, m5B6 surface expression appears mainly restricted to DCs (FIG. 4A). In addition, staining of frozen sections with the mAb 10B4 revealed no staining beyond that attributed to DCs (data not shown).

[0502] Surface levels of m5B6 were then compared on splenic, LN and thymic cDCs. m5B6 was expressed by the CD8⁺cDCs of spleen, thymus and LN (FIG. 4A). Most splenic, thymic and LN CD8⁻cDCs and the migratory cDCs (dermal DCs and Langerhans' cells) were negative for m5B6 expression (FIG. 4A, B). However, a small proportion of CD8⁻cDCs showed above background staining; this could be attributed to a small proportion of DCs of the CD8⁺cDC lineage not yet expressing CD8α, known to be present within this CD8⁻cDC gating. No m5B6 staining was detected on a preparation of inflammatory CD11^{int}CD11b^{hi} DCs from inflamed mouse spleens (Naik et al., 2006) (data not shown). These DC surface expression profiles were consistent with the gene expression observed by quantitative RT-PCR (FIG. 3).

### Surface Expression of Mouse 5B6 on Mouse Blood DC

[0503] Mouse blood contains very few mature DC (CD11c^{hi}) compared to the DC found within the spleen and these few blood DC lack the expression of CD8 (O'Keeffe et al., 2003). However, in the mouse, CD24 expression has correlated with the expression of CD8. A small portion of mature DC within the blood express this marker; presumably these cells are on their way to becoming CD8⁺. To determine the expression of 5B6 on blood DC, we isolated them and stained them with CD24 and 5B6. DC expressing CD24 (which are destined to become CD8⁺DC) also express 5B6 (FIG. 4C).

### Surface Expression of Macaque and Human 5B6

[0504] To investigate the surface expression of human 5B6 (h5B6), we generated two monoclonal antibodies (20/05-3A4; 23/05-4C6) that recognised native protein on the surface of h5B6-transfectant cells, as measured by flow cytometry (data not shown). Staining of freshly isolated peripheral blood cells, from humans or from macaque monkeys, indicated that 5B6 was expressed on a subset of DC (FIG. 5). In particular, a small subset of HLADR⁺ DCs were positive for h5B6 (FIG. 5A). Most other human blood cells did not show positive staining, but low level staining was obtained on human blood B cells (FIG. 5B). To determine if the 5B6-expressing DCs resembled those seen in mouse blood, the blood DCs were also stained with BDCA-1, BDCA-3 and BDCA-4. Staining with mAb 3A4 was restricted to the minor BDCA-3⁺ DC subset (proposed equivalents of mouse CD8⁺ cDC¹⁷), and absent from BDCA-4⁺ subset (data not shown). This suggests h5B6 is present on a cDC type similar to the mouse CD24⁺, CD8⁺ DC lineage (Galibert et al., 2005), but in contrast to the mouse, not on pDCs.

Soluble 5B6 can Interact with Membrane Bound 5B6 in a Cross-Species Manner

[0505] To identify binding partners for the 5B6 molecule, the inventors generated the soluble FLAG-tagged m5B6 and h5B6, and a control soluble FLAG-tagged C-type lectin Cire. The soluble 5B6 was screened for binding to 293T cells expressing membrane bound m5B6 and h5B6 following transient transfections with full length untagged 5B6 constructs in a pIresNeo vector. Soluble mouse 5B6 was able to bind to live 293T cells expressing both the membrane bound mouse 5B6 and human 5B6 but showed minimal or no binding to the mock (no DNA) transfected 293T cells (FIG. 6). Similarly, soluble human 5B6 was able to bind to live 293T cells expressing both the membrane bound mouse 5B6 and human 5B6 but showed no binding to mock transfected 293T cells. In contrast the control soluble molecule Cire showed only minimal binding to the control or transfectant cell lines. Thus, soluble 5B6 can interact with membrane bound 5B6 in a cross-species manner.

### Example 2

### 5B6 Ligand Expressed by Dying and Dead Cells, and Identification of 5B6 Ligands

### Materials and Methods

### Nomenclature

[0506] Throughout this Example 5B6 is referred to as Clec9A.

### Mice

[0507] Female C57BL/6J Wehi mice, 8-12 weeks of age, were bred under specific pathogen free conditions at The Walter and Eliza Hall Institute (WEHI); Animals were handled according to the guidelines of the National Health and Medical Research Council of Australia. Experimental procedures were approved by the Institutional Animal Ethics Committee, WEHI.

### Recombinant Expression of Soluble Clec9A

[0508] Two versions of soluble Clec9A were generated, a full Clec9A ectodomain (Clec9A-ecto; stalk and CTLD), and a Clec9A CTLD only (Clec9A-CTLD). Soluble ectodomain mouse Clec9A is provided as SEQ ID NO:40; soluble ectodomain human Clec9A is provided as SEQ ID NO:41, soluble CTLD only mouse Clec9A is provided as SEQ ID NO:42, and soluble CTLD only human Clec9A is provided as SEQ ID NO:43.

[0509] cDNA containing the required ectodomain region was amplified from the original Clec9A cDNA sequence (Caminschi et al., 2008) using Advantage high fidelity 2 polymerase (Clontech) or HotStar HiFidelity polymerase (Qiagen) and the following primers: mClec9A-ecto-forward: 5′-TAGTAGACGCGTGAGCAGCAGGAAAGACTCATC-3′ (SEQ ID NO:25); mClec9A-CTLD-forward: 5′-TAGTAGACGCGTGGTAGTGACTGCAGCCCTTGT-3′ (SEQ ID NO:38); mClec9A-reverse 5′-TAGTAGACGCGTTCAGATGCAGGATCCAAATGC-3′ (SEQ ID NO:26). hCLEC9A-ecto-forward: 5′-TAGTAGACGCGTCAGCAGCAAGAAAAACTCATC-3′ (SEQ ID NO:27); hCLEC9A-CTLD-forward: 5′-TAGTAGACGCGTAACAGCAGTCCTTGTCCAAACAAT-3′ (SEQ ID NO:39); hCLEC9A-reverse: 5′-TAGTAGACGCGTTCAGACAGAGGATCTCAACGC-3′ (SEQ ID NO:28).

[0510] The amplified cDNA was subcloned into a pEF-Bos vector modified to contain the biotinylation consensus sequence (a peptide consensus sequence NSGLHHILDAQKMVWNHR (SEQ ID NO:31) recognised specifically by E coli biotin holoenzyme synthetase BirA) and the FLAG epitope. The resulting fusion constructs thus included (in order of N-terminus): the IL3 signal sequence (to ensure secretion), the biotinylation consensus peptide sequence, a FLAG-tag, and Clec9A cDNA fragment. Tagged soluble ectodomain mouse Clec9A is provided as SEQ ID NO:44, tagged soluble ectodomain human Clec9A is provided as SEQ ID NO:45, tagged soluble CTLD only mouse Clec9A is provided as SEQ ID NO:46, and tagged soluble CTLD only human Clec9A is provided as SEQ ID NO:47.

[0511] Recombinant proteins were expressed by transient transfection of mammalian cells and culture in protein-free/serum-free media: 293T cells followed by culture in X-Vivo-10 media (BioWhittaker) or FreeStyle 293F cells cultured in FreeStyle Expression Media (Invitrogen). Media containing the secreted recombinant protein was assayed for the presence of soluble mClec9A by reactivity with anti-mouse Clec9A mAb (24/04-10B4). The secreted recombinant protein was concentrated 100-fold using a 10,000 mol wt cutoff centrifugal device (Millipore) and either used directly or enzymatically biotinylated using BIR enzyme (Avidity). Where required, Clec9A soluble proteins were purified by affinity chromatography using an anti-FLAG M2 agarose resin (Sigma) and elution with 100 μg/ml FLAG peptide (Auspep), and further purified by size-exclusion chromatography using a pre-packed Superdex 200 column (GE Healthcare). Furthermore, where required purified soluble Clec9A was specifically biotinylated using BIR enzyme (Avidity).

### Mouse Embryonic Fibroblasts

[0512] Mouse embryonic fibroblasts (MEF) expressing Noxa (van Delft et al., 2006) were seeded a day previously and grown to approximately 80% confluence then induced to undergo apoptosis by treatment with 2.5 μM ABT-737. After 16 h. cells were harvested using Cell Dissociation Buffer (Enzyme-free PBS-based; Gibco).

### Generation of Red Blood Cell Membranes

[0513] Mouse blood was collected into heparinised tubes, diluted 1:25 with PBS and harvested by centrifugation at 1204 g. Red blood cells (RBC) were enriched by collecting the heavy density fraction following density centrifugation (1.091 g/cm³ Nycondenz, Axis-Shield, Oslo, Norway), and washed a further 3 times with PBS before use. Purified RBC membranes were prepared by saponin lysis of RBC using saponin lysis buffer (0.15% Saponin (Sigma) in PBS, supplemented with a protease inhibitor cocktail (Roche)), centrifugation at 16.060 g and repeated washings with same buffer until the membrane cell pellet was white. RBC membranes were then used immediately for staining or frozen at −80° C. for purification of interacting proteins.

[0514] “Spectrin-free” membranes were then prepared using a modified protocol of Clana et al. (2005). In brief, RBC membranes were resuspended in 200 μl 5P8 (5 mM Na-phosphate, 0.5 mM EDTA, 0.2 mM PMSF, pH8.0) then treated with 10 ml 0.5 mM EDTA pH8.5, 0.33 mM DTT, 0.15 mM PMSF for 1 h at 37° C. “Spectrin-free” membranes were recovered by centrifugation at 27,000 g for 40 min at 4° C., and used immediately for staining or stored at −80° C.

### Binding Assays Using Soluble Clec9A

[0515] Binding assays were performed in binding buffer (PBS containing 0.2% BSA/and 0.02% sodium azide), on ice. Cells were washed 3 times with PBS to remove serum proteins, then resuspended in binding buffer. Cells were incubated with either (1) biotinylated soluble Clec9A and controls, and detected with SA-PE, or (2) soluble FLAG-tagged Clec9A, biotinylated anti-FLAG mAb 9H10, then detected with SA-PE. Live cells were gated on forward and side scatter, or by propidium iodide (PI) exclusion, whereas dead cells were gated on forward and side scatter, or by PI inclusion. Analysis of soluble Clec9A binding was performed by flow cytometry using a FACScan (Becton Dickinson). The specificity of the binding was demonstrated by comparison to binding to other soluble FLAG-tagged C-type lectins, mouse Cire/mDCSign (Caminschi et al., 2001) and Clec12A (Pyz et al., 2008).

### ELISA for the Detection of Clec9A Binding

[0516] ELISA plates (Costar, Broadway, Cambridge, UK) were coated overnight at 4° C. with 10 mg/ml of Spectrin (purified from human erythrocytes, Sigma, #S3644) or Actin (Sigma). Unbound proteins were washed away (PBS, 0.05% Tween-20), and the ELISA plates blocked with PBS, 1% BSA. Serially diluted biotinylated purified mClec9A-ecto, mClec9A-CTLD and Cire soluble proteins were plated (PBS, 1% BSA) and incubated at 4° C. overnight. Bound soluble proteins were detected using Streptavidin-HRP and visualised using ABTS.

### Identification of Interacting Proteins Using Protein Microarrays

[0517] Biotinylated purified soluble mClec9A-ecto and Cire (control) were diluted to 50 μg/ml in Casein Washing Buffer (Invitrogen) and hybridised to Human protein microarrays using the “ProtoArray Human Protein Microarray v4.1 Protein-Protein Interaction (PPI) kit for biotinylated proteins” (Invitrogen, #PAH05241011) as per manufacturer's instructions. Binding of the biotinylated proteins was detected using Streptavidin-Alexa Fluor647, and images acquired using a fluorescence microarray scanner (GenePix4000B scanner, Axon Instruments). Positive interactions were identified using the ProtoArray Prospector software (Invitrogen).

Phagocytic Uptake of Dead Cell by DCs from Lymphoid Organs

[0518] Splenic DC were isolated as previously described (Caminschi et al., 2008) and assayed for uptake of dead cells (modified from Schnorrer et al., 2006). In brief, DC were labelled with antibodies to CD11c (N418-allophycocyanin (APC)) and CD8 (YTS169.4-FITC). Splenocytes were subjected to two rounds of freezing then thawing (30s on dry ice followed by 30s at 37° C.) then labelled with 250 ng/ml PI for 10 min at 4° C., and the excess PI dye washed away. Labelled freeze-thawed splenocytes (1×10⁶ cells/well) were incubated with soluble proteins, mClec9A-ecto, mClec9A-CTLD or the control protein Cire, at 25 μg/ml for 30 min at 4° C., before the addition of 2.5×10⁵ DC in modified RPMI-1640 medium containing 10% FCS, 100 U/ml penicillin, 100 μg/ml streptomycin, and 10⁻⁴ M 2-ME. The cocultures were incubated for 3 h at 37° C. to enable phagocytosis, or at 4° C. (control) then harvested for flow cytometric analysis using an LSRII (Becton Dickinson). DC were gated as CD11c⁺CD8⁺ or CD11c⁺CD8⁻ cells and the proportion of DC that were PI⁺ calculated. Uptake at 4° C. was a measure of binding of dead splenocytes to the DC surface, whereas the additional uptake at 37° C. was a measure of phagocytic uptake.

### Results and Discussion

### Generation of Soluble Clec9A Ectodomains

[0519] To seek Clec9A ligands, the inventors first generated tagged soluble forms of the ectodomains of both the mouse and human molecules. Constructs were made encoding either the full Clec9A ectodomain (Clec9A-ecto; stalk region and Clec9A CTLD), or the Clec9A CTLD only (Clec9A-CTLD), and including a FLAG-tag and a biotinylation consensus sequence (Brown et al., 1998) (FIG. 7A). Recombinant soluble mClec9A and hCLEC9A proteins were expressed in mammalian cells using protein-free/serum-free media. They were either enzymatically biotinylated using BirA (Avidity) enzyme (FIG. 7C) and detected with Streptavidin-PE (SA-PE), or they were detected using anti-FLAG reagents. As controls, similar constructs were generated for the other C-type lectins, mouse Cire/mDCSign (Caminschi et al., 2001) and Clec12A (Pyz et al., 2008).

### Mouse and Human Clec9A Bind to Dead Cells

[0520] A variety of mouse and human cells were screened to determine if soluble Clec9A could bind to the cell surface; low or minimal binding was observed with normal viable cells but we observed Clec9A binding to cells that were dead based on staining with the nuclear dye propidium iodide (PI) which stains cell nuclei once the cell membrane is damaged. Therefore, the inventors investigated the binding of mClec9A to thymocytes induced to undergo apoptosis using v-irradiation.

[0521] Thymocytes were stained with Annexin V, an early marker of apoptosis, and with PI to mark cells damaged to the point of having disrupted cell membranes mClec9A-ecto strongly bound to some apoptotic mouse thymocytes, but not to their viable counterparts; notably binding was restricted to late stage apoptotic/secondary necrotic cells (Annexin V⁺PI⁺) but not to early stage Annexin V⁺ apoptotic cells (FIG. 8A).

[0522] The present inventors further investigated mouse embryonic fibroblasts (MEF) induced to undergo apoptosis induced by the BH3 mimetic drug ABT-737. They found that both mClec9A and hCLEC9A strongly bound to late stage apoptotic MEFs, but not their live counterparts (FIG. 8B). Pretreatment of apoptotic cells with proteases (trypsin, protease K), but not with nucleases, reduced Clec9A binding in a dose dependent manner, suggesting the ligand was or ligands were a protein or protein-associated molecule(s) (FIG. 8C). The level of binding to dead cells was higher than any “non-specific” binding seen with soluble forms of other C-type lectins tested, namely Cire (FIG. 8A, B and C) and Clec12A (data not shown).

[0523] The possibility that cell membrane rupture was all that was required to reveal the ligand(s) was tested by staining with Clec9A immediately after freezing and thawing cells, as a model of primary necrosis. Clec9A bound to frozen and thawed 3T3 cells (FIG. 9A), to other frozen and thawed mouse cells, as well as to fixed and permeabilised cells and to frozen mouse tissue sections (data not shown). The binding included the exposed external surface of the dead cells, since it was also seen under fluorescence microscopy when fluorescent beads coated with mClec9A were used instead of soluble mClec9A (data not shown). Treatment of viable cells with trypsin prior to freeze-thawing did not eliminate Clec9A binding (data not shown), indicating the ligand(s) was initially within the cells.

[0524] In summary, the data indicates that the ligand(s) for Clec9A are normally contained within viable cells, and are only exposed after membrane disruption, such as occurs in late apoptosis or necrosis.

### Binding to Dead Cells is Via the C-Type Lectin Domain

[0525] To investigate the requirements for Clec9A binding to dead cells, the shorter form of the soluble recombinant proteins (CTLD only) was compared to the soluble full length ectodomains (stalk+CTLD). The mClec9A-CTLD and hCLEC9A-CTLD were both monomeric, compared to the homodimeric mClec9A ectodomains, indicating the stalk region was required for homodimerisation (FIG. 7). However, the mClec9A-CTLD and hCLEC9A-CTLD both showed similar levels of binding to dead cells as the full length ectodomains, indicating that the monomeric CTLD is sufficient for binding (FIG. 9A). The mClec9A-ecto and mClec9A-CTLD showed similar levels of binding even when limiting dilutions of Clec9A were used, indicating that the ectodomain and CTLD bound with similarly to the dead cells.

[0526] Since binding was unaffected by EDTA (FIG. 9B), divalent metal ions such as calcium are not required for binding.

### Species Conservation of Clec9A Binding to Dead Cells

[0527] As indicated in FIGS. 8 and 9A, both mouse and human Clec9A bound to dead mouse cells. Binding was seen to all dead mouse cell types tested, whether from cultured cell lines or freshly isolated cells. Mouse and human Clec9A also bound equally well to dead human cells (FIG. 9B), as well as to hamster and monkey cells (data not shown). Binding was also seen to frozen and thawed insect cells, but not to frozen and thawed bacteria or yeast (FIG. 9C). Thus, recognition of dead cells by Clec9A is conserved across evolution and the ligand(s) are expressed by most animal and even insect cells.

### Clec9A Binds to a Cytoskeletal Component of Cell Membranes

[0528] To determine whether Clec9A could bind to a ligand present within cell membranes, mClec9A was assayed for its ability to bind to membranes isolated from mouse red blood cells (RBC ghosts). RBC ghosts were prepared by lysis and repeated washing of the RBC in a saponin containing buffer, in order to permeabilise the cells and prevent resealing of the RBC membranes. Both Clec9A-ecto and Clec9A-CTLD bound to the RBC membranes, whereas two control proteins (Cire and Clec12A) showed no binding. Furthermore, Clec9A was found to bind at lower levels if the RBC membranes had been treated with a “spectrin-removal” buffer, indicating that Clec9A bound to spectrin or to a spectrin-associated cytoskeletal component (FIG. 10).

### Clec9A Binds to Purified Spectrin

[0529] To determine whether Clec9A could interact directly with spectrin, soluble Clec9A-ecto, Clec9A-CTLD and the control protein Cire were assayed for their ability to bind to purified spectrin and to actin using an Enzyme Linked ImmunoSorbent Assay (ELISA). Purified biotinylated Clec9A soluble proteins (Clec9A-ecto and Clec9A-CTLD) bound to spectrin, whereas Cire did not bind to spectrin nor to actin (FIG. 11). mClec9A-ecto bound to spectrin more efficiently than Clec9A-CTLD, indicating that the stalk region of Clec9A may contribute to the (affinity of) interaction between Clec9A and spectrin (FIG. 11).

Clec9A-Ecto Interacts with RNF41

[0530] To determine whether Clec9A could interact with further molecules, purified biotinylated mClec9A-ecto and Cire were used to screen human protein microarrays. mClec9A-ecto was found to bind to isoforms of RNF41 (Accession number NM_{—}194358). Therefore RNF41 is another possible binding partner.

### Does Clec9A Mediate Uptake of Dead Cells by DC?

[0531] Clec9A is expressed on splenic DCs, and not on CD8−DCs, as reported previously (Caminschi et al., 2008; Sancho et al., 2008) and confirmed in FIG. 12A. CD8+ DCs have been reported previously to be more efficient at phagocytosis of dead cells (Iyoda et al., 2002; Schulz et al, 2002; Schnorrer et al., 2006). The inventors therefore investigated whether uptake of dead cells could be blocked using an excess of soluble Clec9A. As previously reported (Iyoda et al., 2002; Schulz and Sousa, 2002), the CD8+ DC were more efficient than their CD8− counterparts at phagocytosis of dead splenocytes that had been labelled with the nuclear dye PI (FIG. 12B). However, the addition of soluble mClec9A, whether the full ectodomain (mClec9A-ecto; FIG. 12B) or CTLD only (data not shown) had no noticeable effect on CD8+ DC uptake of dead cells. Similar results were observed using dead splenocytes that had been labelled with the lipophilic membrane dye PKH26 (data not shown).

### Conclusions

[0532] Clec9A binds strongly to late apoptotic or necrotic cells; it recognises a component or components that are expressed by cells of diverse origins and tissue types, but are not accessible until the cell membrane is disrupted. Clec9A can therefore serve to distinguish early apoptotic from necrotic cells. This is considered to be an important distinction in the biology of DCs, as uptake of early apoptotic cells has been reported to promote an immunosuppressive environment to self-Ag whereas necrosis or failed clearance of apoptotic cells has been reported to promote immunogenic responses. Clec9A is selectively expressed on CD8⁺ DCs, which are specialised for the uptake and processing of Ag from dead cells, so it is likely to have a role in this process. Spectrin and RNF41 both appear to bind to mClec9A, indicating these may constitute some of the binding partners for this molecule.

### Example 3

### Identification of the m5B6 Ligand

[0533] CD8+DC ingest dead cells more efficiently than other DC types (Iyoda et al., 2002). m5B6, expressed on CD8+ DC, specifically binds dead cells, but not early stage apoptotic cells. Molecules used by CD8+ DC to differentiate between early stage apoptotic cells and necrotic cells are of prime importance because uptake of early stage apoptotic cells by DC induces tolerance, but uptake of necrotic cells induces immunity (Sauter et al., 2000). Thus differential recognition of these states by receptors on DC is crucial to the immune system. Importantly, only CD8+ DC are capable of inducing efficient CD8 T cell responses to exogenous Ag (Belz et al., 2004).

[0534] Some related C-type lectins have had their ligands identified, and some have multiple ligands (eg. LOX-1/Clec8a, Dectin-1/Clec7a). The identity of 5B6 ligand(s) will be determined using a panel of immunochemical and proteomic techniques.

[0535] In a first approach, cells will be metabolically labelled using 35S, induce cell death, then incubate with soluble FLAG-tagged m5B6. Excess free Clec9A will be washed away and the cells incubated in the presence or absence of a chemical cross-linker. Cells will be lysed, and the complex affinity purified using either anti-FLAG M2 or anti-5B6-affinity resin. Bound proteins will be eluted with an excess of FLAG or 5B6 peptide.

[0536] In a complementary approach, a large batch of sol-5B6 will be purified and conjugated to NHS-activated Sepharose resin. Lysates from at least 5×10⁷ EL4 cells will be incubated with 5B6 affinity resin, and bound proteins eluted. Eluted proteins will be analysed by SDS-PAGE, transferred to PVDF membrane and visualised using a phosphorimager. To identify positive bands, this procedure will be scaled-up and eluates analysed by SDS-PAGE and Sypro Ruby/Coomassie blue staining. Bands will be excised and proteins identified using mass-spectrometry. In brief, protein bands will be digested with trypsin (Moritz et al., 1996), separated, by capillary chromatography (Moritz et al., 1992) and sequenced using an on-line electrospray ionisation ion-trap mass-spectrometer (Simpson et al., 2000).

[0537] In a further complementary approach, rats will be immunized with dead cells and perform a fusion to generate hybridomas by standard protocols. Hybridomas will be screened for Ab that bind to dead cells and block the binding of sol-5B6 as assayed by flow cytometry. We will clone and purify the blocking Ab, and use it to immunoprecipitate the ligand to enable identification by mass-spectrometry.

[0538] Myc-tagged expression constructs for potential ligands will be generated, transiently transfected into 293T cells and induce cell death, before incubation with 5B6+ DC or 5B6 transfectant cells. We will lyse the cells, immunoprecipitate 5136-complexes using anti-Clec9A mAb and analyse for co-precipitation of the myc-tagged ligand by Western blot. Alternatively, we will perform direct Western blots of 5B6 complexes. In a complementary approach, we will express potential candidates as recombinant soluble molecules and confirm their binding to 5B6 transfectants.

[0539] Antibodies which bind the 5B6 ligand will be generated using standard procedures.

### Example 4

### Clec9A binds RNF41

### Materials and Methods

### Expression and Purification of GST-RNF41 Proteins

[0540] cDNA constructs encoding two forms of RNF41 (full length RNF41 (SEQ ID NO:76); RNF41 transcript variant 2 (SEQ ID NO:77)) were subcloned into a modified pGEX-2T vector (GE Healthcare). Recombinant proteins were expressed as glutathione S-transferase (GST) fusion proteins in BL21 (DE3) E. coli and purified as described previously (Grieco et al, 1992). Briefly, BL21 (DE3) cells, transformed with plasmid, were cultured at 30° C. in Superbroth and induced when OD₆₀₀ reached ˜0.8 with 0.1 mM isopropyl-β-thiogalactopyranoside (IPTG) for 3 hours. The IPTG-induced cells were lysed with lysis buffer (0.2 mg/mL lysozyme, 1% Triton-X 100, 30 μg/mL DNase I, 1 mM PMSF in phosphate-buffered saline) for 1 hour on ice. The lysed cells were centrifuged at 16060 g for 15 minutes at 4° C. The resulting insoluble pellet containing the GST-RNF41 proteins was suspended initially in 1.5% N-lauroylsarcosine (Sarcosyl™, Sigma) for 10 min (4° C.) to extract GST-RNF41 proteins, and supplemented with 2% Triton X-100 and 1 mM CaCl₂ for an additional 10 min. The lysate was centrifuged (16060 g, 1.5 min). Supernatants containing the solubilised GST-RNF41 proteins were incubated with Glutathione-Sepharose 4B resin (GE Healthcare) for 1 h (4° C.). Glutathione-Sepharose resin coupled with GST-RNF41 fusion proteins was used in pull-down assays for detecting protein-protein interaction, as described below.

[0541] As a control, GST-protein was prepared by transforming BL21 cells with a plasmid control, IPTG induction, lysis and centrifugation. The resulting supernatant, containing the GST protein, was supplemented with 1.5% Sarcosyl, 1% Triton X-100, 1 mM CaCl₂. The GST protein was bound to Glutathione-Sepharose 4B resin and used as a control in the pull-down assays.

### Protein-Protein Interaction by the Pull-Down Assay

[0542] Glutathione Sepharose resin coupled with either GST or GST-RNF41 proteins was resuspended in the binding buffer (0.2% NP-40 and 2% glycerol in 20 mM Tris-buffered saline, pH 7.5 containing complete protease inhibitor cocktail mixture (Roche) and 1 mM PMSF) and mixed with 1 μg/m purified FLAG-tagged soluble Clec9A (also in binding buffer) and incubated at 4° C. on a rotating wheel for 2 hours. The beads were washed extensively with the binding buffer to remove unbound proteins. Bound proteins were eluted from the beads by the addition of 2×SDS reducing sample and heated at 92° C. for 5 minutes. The eluted proteins were separated by SDS-PAGE followed by Western blot with anti-FLAG antibody.

### Results

[0543] In an alternative approach to detect Clec9A interacting proteins, the inventors hybridised mClec9A-ecto and Cire, with protein microarrays (Invitrogen) consisting of glutathione S-transferase (GST)-tagged human proteins. mClec9A-ecto bound to an isoform of RNF41 (encoded by RNF41 transcript variant 2), whereas Cire-ecto did not bind RNF41. The inventors subcloned and expressed full length RNF41 (RNF41_{FL}), and RNF41 transcript variant 2 (RNF41₇₂₋₃₁₇) as GST-RNF41 fusion proteins in bacterial cells. The fusion proteins were immobilized onto glutathione beads, and incubated with mClec9A-ecto or with the control mClec12A-ecto. mClec9A-ecto directly bound to both GST-RNF41_{FL} and GST-RNF41₇₂₋₃₁₇, but not to GST alone (FIG. 13). In contrast, the control Clec 12A did not bind to RNF41. This confirmed that mClec9A binds specifically to RNF41. These studies were extended to investigate hCLEC9A interactions, and found that hClec9A-ecto similarly bound RNF41 (FIG. 13), indicating the Clec9A-RNF41 interaction is conserved among species.

[0544] It will be appreciated by persons skilled in the art that numerous variations and/or modifications may be made to the invention as shown in the specific embodiments without departing from the spirit or scope of the invention as broadly described. The present embodiments are, therefore, to be considered in all respects as illustrative and not restrictive.

[0545] This application claims priority from U.S. 61/162,616 filed 23 Mar. 2009, the entire contents of which are incorporated herein by reference.

[0546] All publications discussed and/or referenced herein are incorporated herein in their entirety.

[0547] Any discussion of documents, acts, materials, devices, articles or the like which has been included in the present specification is solely for the purpose of providing a context for the present invention. It is not to be taken as an admission that any or all of these matters form part of the prior art base or were common general knowledge in the field relevant to the present invention as it existed before the priority date of each claim of this application.

### REFERENCES

[0548] Almeida and Allshire (2005) TRENDS Cell Biol 15: 251-258.
[0549] Al-Mufti et al (1999) Am. J. Med. Genet. 85:66-75.
[0550] Bauer et al (2002) Int J Legal Med 116:39-42.
[0551] Belz et al (2004). Proc Natl Acad Sci USA 101:8670-8675.
[0552] Belz et al. (2005) J Immunol 175, 196-200 (2005).
[0553] Binder et al. (2004) Tissue Antigens 64, 442-51 (2004).
[0554] Bird et al (1988) Blood 80:1418-1422.
[0555] Bonifaz et al (2002) J Exp Med 196:1627-1638.
[0556] Bourque (1995) Plant Sci. 105:125-149.
[0557] Broderick and Winder (2005) Advan Prot Chem 70:203-246.
[0558] Brown et al (1998) J Exp Med 188, 2083-90.
[0559] Caminschi et al (2001) Mol Immunol 38:365-373.
[0560] Caminschi et al (2008) Blood 112:3264-3273.
[0561] Chothia and Lesk (1987) J. Mol. Biol. 196:901-917.
[0562] Ciana et al (2005) J Biosci 30:317-328.
[0563] Colcher et al (1986) Methods Enzymol. 121:802-816.
[0564] Delneste (2004) Biochem Soc Trans 32, 633-5.
[0565] Demangel et al (2005) Mol Immunol 42:979-985.
[0566] Dunbrack et al (1997) Folding and Design, 2:R27-42.
[0567] Finkelman et al (1996). J Immunol 157:1406-1414.
[0568] Fuller et al (2007) J Biol Chem 282:12397-12409.
[0569] Galibert et al (2005) J Biol Chem 280:21955-21964.
[0570] Greenwood et al (1993) Eur J Immunol 23: 1098-1104.
[0571] Grieco et al (1992) BioTechniques 13:856-857.
[0572] Harayama (1998) Trends Biotech. 16:76-82.
[0573] Haseloff and Gerlach (1988) Nature 334:585-591.
[0574] Heath and Valladangos (2005)
[0575] Henri et al (2001) J Immunol 167, 741-748 (2001).
[0576] Hochrein et al (2001) J Immunol 166:5448-5455.
[0577] Hoeffel et al (2007) Immunity 27, 481-92.
[0578] Hume (2008) Nat Immunol 9, 12-4.
[0579] Huston et al (1988) Proc Natl Acad Sci USA 85:5879-5883.
[0580] Iyoda et al (2002) J Exp Med 195, 1289-302.
[0581] Jones et al (1986) Nature 321:522-525.
[0582] Kenna et al (2008) Blood 111, 2091-100 (2008).
[0583] Lahoud et al (2006) J Immunol 177:372-382.
[0584] Leserman (2004) J Liposome Res 14:175-189.
[0585] Millar and Waterhouse (2005) Funct Integr Genomics 5:129-135.
[0586] Miller (1990) Blood 76:271-278.
[0587] Moritz et al. (1992) J Chromatogram 599:119-130.
[0588] Moritz et al. (1996) Electrophoresis 17:907-917.
[0589] Morrison et al (1984) Proc Natl Acad Sci USA 81:6851-6855.
[0590] Nagata (2007) Immunol Rev 220, 237-50 (2007).
[0591] Naik et al (2006) Nat Immunol 7:663-671.
[0592] Naik et al. (2005) J Immunol 174:6592-6597.
[0593] Nchinda et al (2008) J Clin Investig 118:1427-1436.
[0594] Needleman and Wunsch. (1970). J. Mol. Biol., 48, 443-453.
[0595] O'Keeffe et al (2002) J Exp Med 196:1307-1319.
[0596] O'Keeffe et al (2003) Blood 101:1453-1459.
[0597] Pasquinelli et al (2005) Curr Opin Genet Develop 15: 200-205.
[0598] Pastan et al (1986) Cell 47: 641-648.
[0599] Peng et al (2007) J Autoimmun 29:303-309.
[0600] Perriman et al (1992) Gene 113: 157-16.
[0601] Pyz et al (2008) Eur J Immunol 38:1157-1163.
[0602] Sancho et al (2008) J Clin Invest 118:2098-2110.
[0603] Sauter et al (2000) J Exp Med 191, 423-434.
[0604] Schnorrer et al (2006) Proc Natl Acad Sci USA 103:10729-10734.
[0605] Schulz & Sousa (2002) Immunology 107:183-189.
[0606] Senior (1998) Biotech. Genet. Engin. Revs. 15:79-119.
[0607] Shippy et al (1999) Mol. Biotech. 12: 117-129.
[0608] Shortman and Naik (2007). Nat Rev Immunol 7:19-30.
[0609] Simpson et al. (2000) Electrophoresis 21:1707-1732.
[0610] Smith et al (2000) Nature 407: 319-320.
[0611] Steinman et al (2000) J Exp Med 191, 411-6.
[0612] Steinman et al (2003) Annu Rev Immunol 21:685-711.
[0613] Sun et al (1986) Hybridoma 5S1:517-520.
[0614] Thorpe et al (1987) Cancer Res 47: 5924-31.
[0615] van Broekhoven et al (2004) Cancer Res 64:4357-4365.
[0616] van Delft et al (2006) Cancer Cell 10, 389-99
[0617] Vandenabeele et al (2001) Blood 97:1733-1741.
[0618] Vitetta et al (1987) Science 238: 1098-1104.
[0619] Vremec et al (2000) J Immunol 164:2978-2986.
[0620] Waldmann (1991) Science 252: 1657-1662.
[0621] Waterhouse et al (1998) Proc. Natl. Acad. Sci. USA 95: 13959-13964.
[0622] Weis et al (1998) Immunol Rev. 163:19-34.

1. A composition comprising compound comprising a polypeptide conjugate, wherein the polypeptide of the polypeptide conjugate comprises:
i) an amino acid sequence as provided in any one of SEQ ID NO's 48 to 80;
ii) an amino acid sequence which is at least 50% identical to any one or more of SEQ ID NO's 48 to 80; and/or
iii) a biologically active fragment of i) or ii),
and wherein the polypeptide of the compound binds a second polypeptide comprising
a) an amino acid sequence as provided in any one of SEQ ID NO's 1 to 8; and/or
b) an amino acid sequence which is at least 50% identical to any one or more of SEQ ID NO's 1 to 8.

2. The composition of claim 1, wherein the polypeptide comprises an amino acid sequence which is at least 90% identical to any one or more of SEQ ID NO's 48 to 80.

3. The composition of claim 1, wherein the polypeptide is conjugated to a therapeutic agent.

4. The composition of claim 3, wherein the therapeutic agent is an antigen.

5. The composition of claim 3, wherein the therapeutic agent is selected from the group consisting of a cytotoxic agent, a cancer antigen, a self antigen, an allergen, or an antigen from an infectious organism.

6. The composition of claim 3, wherein the therapeutic agent is a drug and/or pharmacological agent.

7. The composition of claim 1, wherein the polypeptide is conjugated to a detectable label.

8. A composition comprising a compound that binds a polypeptide which comprises:
i) an amino acid sequence as provided in any one of SEQ ID NO's 48 to 80;
ii) an amino acid sequence which is at least 50% identical to any one or more of SEQ ID NO's 48 to 80; and/or
iii) a biologically active fragment of i) or ii).

9. The composition of claim 8 which binds a polypeptide which comprises an amino acid sequence which is at least 90% identical to any one or more of SEQ ID NO's 48 to 80.

10. The composition of claim 8 which is a polypeptide.

11. The composition of claim 10 which is an antibody or antigenic binding fragment thereof.

12. The composition of claim 11, wherein the antibody is a monoclonal antibody, humanized antibody, single chain antibody, diabody, triabody, or tetrabody.

13. The compound according to claim 8 which is conjugated to a therapeutic agent or a detectable label.

14. The composition of claim 13, wherein the compound is conjugated to a therapeutic agent.

15. The composition of claim 14, wherein the therapeutic agent is an antigen.

16. The composition of claim 13, wherein the therapeutic agent is a cytotoxic agent, a cancer antigen, a self antigen, an allergen, and/or an antigen from an infectious organism.

17. The composition of claim 13, wherein the therapeutic agent is a drug and/or pharmacological agent.

18. (canceled)

19. The composition according to claim 1 wherein the composition comprises a pharmaceutically acceptable carrier.

20. The composition of claim 19 which comprises an adjuvant.

21. The composition of claim 19, wherein the compound is encapsulated in, or exposed on the surface of, a liposome.

22. A method of modulating an immune response in a subject, the method comprising administering to the subject a composition according to claim 1.

23. The method of claim 22, wherein an immune response to an antigen is induced and/or enhanced.

24. The method of claim 22, wherein an immune response to a self antigen or allergen is reduced.

25. A method of modulating an immune response to an antigen in a subject, the method comprising exposing dendritic cells or precursors thereof in vitro to a composition according to claim 3, and administering said cells to the subject.

26. The method of claim 25, wherein the cells have been isolated from the subject.

27.-28. (canceled)

29. A method of treating and/or preventing a disease involving dendritic cells or precursors thereof, the method comprising administering to the subject a composition according to claim 3, wherein.

30. (canceled)

31. A method of treating and/or preventing a disease involving dendritic cells or precursors thereof, the method comprising administering to the subject an isolated polynucleotide and/or construct encoding said polynucleotide which, when present in a cell of the subject, modulates the level of activity of a polypeptide which comprises:
i) an amino acid sequence as provided in any one of SEQ ID NO's 48 to 80; and/or
ii) an amino acid sequence which is at least 50% identical to any one or more of SEQ ID NO's 48 to 80,
in the cell when compared to a cell that lacks said polynucleotide.

32. The method of claim 31, wherein the polynucleotide down-regulates the level of activity of the polypeptide in the cell, and wherein the polynucleotide is selected from: an antisense polynucleotide, a sense polynucleotide, a catalytic polynucleotide, a microRNA, and a double stranded RNA.

33. The method according to claim 29, wherein the disease involving dendritic cells or precursors thereof is cancer, an infection, an autoimmune disease or an allergy.

34. The method of claim 33, wherein the autoimmune disease is lupus erythematosus.

35. The method of claim 33, wherein the infection is a Plasmodium sp. infection.

36. A method of modulating the uptake and/or clearance of cells with a disrupted cell membrane, cells infected with a pathogen, dying cells or dead cells, or a portion thereof, in a subject, the method comprising administering
i) a polypeptide comprising
a) an amino acid sequence as provided in any one of SEQ ID NO's 48 to 80;
b) an amino acid sequence which is at least 50% identical to any one or more of SEQ ID NO's 48 to 80; and/or
c) a biologically active fragment of a) or b),
ii) a composition according to claim 1.

37. A method of modulating the antigen recognition, processing and/or presentation of material derived from cells with a disrupted cell membrane, cells infected with a pathogen, dying cells or dead cells, or a portion thereof, or surrounding cells, in a subject, the method comprising administering
i) a polypeptide comprising
a) an amino acid sequence as provided in any one of SEQ ID NO's 48 to 80;
b) an amino acid sequence which is at least 50% identical to any one or more of SEQ ID NO's 48 to 80; and/or
c) a biologically active fragment of a) or b),
ii) a composition according to claim 1.

38. A method of modulating an immune response to material derived from cells with a disrupted cell membrane, cells infected with a pathogen, dying cells or dead cells, or a portion thereof, or surrounding cells, in a subject, the method comprising administering a
i) a polypeptide comprising
a) an amino acid sequence as provided in any one of SEQ ID NO's 48 to 80;
b) an amino acid sequence which is at least 50% identical to any one or more of SEQ ID NO's 48 to 80; and/or
c) a biologically active fragment of a) or b),
ii) a composition according to claim 1.

39. A method of modulating the uptake and/or clearance of cells with a disrupted cell membrane, cells infected with a pathogen, dying cells or dead cells, or a portion thereof, and/or modulating the antigen recognition, processing and/or presentation of material derived from cells with a disrupted cell membrane, cells infected with a pathogen, dying cells or dead cells, or a portion thereof, or surrounding cells and/or modulating an immune response to material derived from cells with a disrupted cell membrane, cells infected with a pathogen, dying cells or dead cells, or a portion thereof, or surrounding cells, in a subject, the method comprising:
administering to the subject a compound which modulates the production of a polypeptide which comprises:
i) an amino acid sequence as provided in any one of SEQ ID NO's 48 to 80;
ii) an amino acid sequence which is at least 50% identical to any one or more of SEQ ID NO's 48 to 80; and/or
iii) a biologically active fragment of i) or ii).

40.-41. (canceled)

42. The method according to claim 39, wherein the compound is a polynucleotide.

43. The method of claim 42, wherein the polynucleotide is operably linked to a promoter capable of directing expression of the polynucleotide in a cell of an animal.

44. The method of claim 42, wherein the polynucleotide down-regulates mRNA levels from a gene encoding the polypeptide.

45. The method of claim 44, wherein the polynucleotide is selected from: an antisense polynucleotide, a sense polynucleotide, a catalytic polynucleotide, a microRNA, and a double stranded RNA.

46. The method of claim 42, wherein the polynucleotide up-regulates mRNA levels from a gene encoding the polypeptide.

47. The method of claim 36, wherein the uptake and/or clearance of cells with a disrupted cell membrane, cells infected with a pathogen, dying cells or dead cells, or a portion thereof, is increased.

48. The method of claim 36, wherein the uptake and/or clearance of cells with a disrupted cell membrane, cells infected with a pathogen, dying cells or dead cells, or a portion thereof, is decreased.

49. The method of claim 37, wherein antigen recognition, processing and/or presentation of material derived from cells with a disrupted cell membrane, cells infected with a pathogen, dying cells or dead cells, or a portion thereof, or surrounding cells, is increased.

50. The method of claim 37, wherein antigen recognition, processing and/or presentation of material derived from cells with a disrupted cell membrane, cells infected with a pathogen, dying cells or dead cells, or a portion thereof, or surrounding cells, is decreased.

51. The method of claim 38, wherein the immune response to material derived from cells with a disrupted cell membrane, cells infected with a pathogen, dying cells or dead cells, or a portion thereof, or surrounding cells, is increased.

52. The method of claim 38, wherein the immune response to material derived from cells with a disrupted cell membrane, cells infected with a pathogen, dying cells or dead cells, or a portion thereof, or surrounding cells, is decreased.

53. The method according to claim 36, wherein the subject is suffering from a disease selected from: graft versus host disease (GVHD), an autoimmune disease, an infection, a neurodegenerative disease, systemic inflammatory reaction syndrome (SIRS), cancer and injury.

54.-62. (canceled)

63. A method of diagnosing, prognosing and/or monitoring the status of a disease associated with cells with a disrupted cell membrane, cells infected with a pathogen, dying cells or dead cells, the method comprising
i) contacting a cell with the composition of claim 8, and
ii) determining whether the polypeptide is present or absent,
wherein the presence of the polypeptide provides a diagnosis, prognosis and/or status of the disease.

64. The method of 63, wherein the compound is an antibody or antigenic binding fragment thereof.

65. The method of claim 63, wherein the compound is detectably labelled.

66. The method according to claim 63 which is performed in vivo on a subject.

67. The method according to claim 63 which is performed in vitro on a sample obtained from a subject.

68. The method according to claim 63, wherein the disease is selected from: graft versus host disease (GVHD), an autoimmune disease, an infection, a neurodegenerative disease, systemic inflammatory reaction syndrome (SIRS), cancer and injury.

69. A method of monitoring the effectiveness of a therapy for killing a cell, the method comprising;
i) exposing a cell to the therapy, and
ii) detecting a cell with a disrupted cell membrane, a dying cell or a dead cell, or a portion thereof, using a method according to claim 63,
wherein the presence of a cell with a disrupted cell membrane, a dying cell or a dead cell indicates that the therapy is effective.

70. The method of claim 69, wherein the cell in step i) is in vivo.

71. The method of claim 69, wherein the therapy is administered to a subject.

72. The method of claim 69, wherein the subject has cancer or an infection.

73. The method according to claim 69, wherein step ii) is performed on a sample obtained from a subject.

74. The method according to claim 69, wherein the therapy is drug therapy or radiotherapy.

75. A method of distinguishing between an early stage apoptotic cell and a late stage apoptotic cell, necrotic cell or dead cell, the method comprising
i) contacting a cell with a composition according to claim 1, and
ii) determining whether binding of the compound to the polypeptide is present or absent, wherein the compound binding to the polypeptide indicates that the cell is a late stage apoptotic cell, necrotic cell or dead cell.

76. A method of modulating an immune response to an antigen in a subject, the method comprising
i) obtaining a population of dendritic cells or precursors thereof,
ii) modulating the production and/or activity of a polypeptide which comprises:
a) an amino acid sequence as provided in any one of SEQ ID NO's 48 to 80;
b) an amino acid sequence which is at least 50% identical to any one or more of SEQ ID NO's 48 to 80; and/or
c) a biologically active fragment of a) or b),
iii) contacting the dendritic cells or precursors thereof with the antigen, and
iv) administering the dendritic cells or precursors thereof to the subject.

77. The method of claim 76, wherein step iii) comprises contacting the dendritic cells or precursors thereof with a cell with a disrupted cell membrane, a cell infected with a pathogen, a dying cell, a dead cell, and/or a portion thereof, comprising said antigen.

78. The method of claim 76, wherein step iii) comprises
a) obtaining a cell comprising the antigen,
b) disrupting the cell membrane of the cell, and
c) contacting the product of step b) with the dendritic cells or precursors thereof.

79. The method according to claim 76 which further comprises, before step ii), enriching the population for cells expressing the polypeptide.

80. A method of enriching dendritic cells, or a subset or precursors thereof, from a sample comprising;
i) contacting a sample comprising dendritic cells or precursors thereof with a compound according to claim 1, and
ii) isolating cells bound to the compound.

81. A method of enriching dendritic cells, or a subset or precursors thereof, from a sample comprising;
i) contacting a sample comprising dendritic cells or precursors thereof with a detectably labelled first polynucleotide that hybridizes to a second polynucleotide encoding a polypeptide which comprises
a) an amino acid sequence as provided in any one of SEQ ID NO's 48 to 80; and/or
b) an amino acid sequence which is at least 50% identical to any one or more of SEQ ID NO's 48 to 80, and
ii) isolating the detectably labelled cells.

82. The method of claim 80, wherein the cells obtained from step ii) are administered to a subject.

83. The method of claim 82, wherein the cells are administered to treat and/or prevent a disease selected from cancer, an infection, an autoimmune disease or an allergy.

84. A method of detecting dendritic cells, or a subset or precursors thereof, in a sample comprising;
i) contacting a sample comprising dendritic cells or precursors thereof with a compound according to claim 1, and
ii) detecting cells bound to the compound.

85. A method of detecting dendritic cells, or a subset or precursor thereof, in a sample comprising;
i) contacting a sample comprising dendritic cells or precursors thereof with a detectably labelled first polynucleotide that hybridizes to a second polynucleotide encoding a polypeptide which comprises
a) an amino acid sequence as provided in any one of SEQ ID NO's 48 to 80; and/or
b) an amino acid sequence which is at least 50% identical to any one or more of SEQ ID NO's 48 to 80, and
ii) detecting the detectably labelled cells.

86. A method of detecting dendritic cells, or a subset or precursor thereof, in a subject comprising;
i) administering to the subject a compound according to claim 1,
ii) detecting cells bound to the compound.

87. The method of claim 84, wherein the compound is detectably labelled.

88. A method of detecting dendritic cells, or a subset or precursor thereof, in a subject comprising;
i) administering to the subject a detectably labelled first polynucleotide that hybridizes to a second polynucleotide encoding a polypeptide which comprises
a) an amino acid sequence as provided in any one of SEQ ID NO's 48 to 80; and/or
b) an amino acid sequence which is at least 50% identical to any one or more of SEQ ID NO's 48 to 80, and,
ii) detecting the detectably labelled cells.

89. The method according to claim 80, wherein the dendritic cells express one or more of the following markers, CD8, CD24, Necl-2, CD11c, HLADR and BDCA3.

90. A method of detecting a cell with a disrupted cell membrane, a cell infected with a pathogen, a dying cell or a dead cell, the method comprising
i) contacting a cell with a compound that binds a polypeptide comprising
a) an amino acid sequence as provided in any one of SEQ ID NO's 48 to 80;
b) an amino acid sequence which is at least 50% identical to any one or more of SEQ ID NO's 48 to 80; and/or
c) a biologically active fragment of a) or b), and
ii) determining whether binding of the compound to the polypeptide is present or absent, wherein the compound binding to the polypeptide indicates that the cell has a disrupted cell membrane, is infected with a pathogen, is dying or is dead.

91. An isolated and/or exogenous polynucleotide encoding a compound according to claim 1, wherein the compound is a polypeptide.

92. An isolated polynucleotide which, when present in a cell of a subject, modulates the level of activity of a polypeptide in the cell when compared to a cell that lacks said polynucleotide, wherein the polypeptide comprises
i) an amino acid sequence as provided in any one of SEQ ID NO's 48 to 80;
ii) an amino acid sequence which is at least 50% identical to any one or more of SEQ ID NO's 48 to 80; and/or
iii) a biologically active fragment of i) or ii).

93. A vector comprising a polynucleotide of claim 91.

94. The vector of claim 93 which is an expression vector.

95. A host cell comprising at least one polynucleotide of claim 91.

96. The host cell of claim 95 which is a bacterial, yeast, insect, animal or plant cell.

97. An enriched population of dendritic cells and/or precursors thereof, obtained by a method according to any claim 80.

98. An expanded dendritic cell population, and/or precursors thereof, obtained by culturing an enriched population of dendritic cells and/or precursors thereof according to claim 97.

99. A composition comprising a polynucleotide of claim 91, and a pharmaceutically acceptable carrier.

100. A kit comprising a composition according to claim 1.

The application's sequence listing, which the Patent Office published only in electronic form, follows.

SEQUENCE LISTING (113 sequences)

SEQ ID NO: 1 - protein, 241 aa, Homo sapiens
MHEEEIYTSLQWDSPAPDTYQKCLSSNKCSGACCLVMVISCVFCMGLLTASIFLGVKLLQVSTIAMQQQEKLIQQERALLNFTEWKRSCALQMKYCQAFMQNSLSSAHNSSPCPNNWIQNRESCYYVSEIWSIWHTSQENCLKEGSTLLQIESKEEMDFITGSLRKIKGSYDYWVGLSQDGHSGRWLWQDGSSPSPGLLPAERSQSANQVCGYVKSNSLLSSNCSTWKYFICEKYALRSSV

SEQ ID NO: 2 - protein, 264 aa, Mus musculus
MHAEEIYTSLQWDIPTSEASQKCQSPSKCSGAWCVVTMISCVVCMGLLATSIFLGIKFFQVSSLVLEQQERLIQQDTALVNLTQWQRKYTLEYCQALLQRSLHSGTDASTGPVLLTSPQMVPQTLDSKETGSDCSPCPHNWIQNGKSCYYVFERWEMWNISKKSCLKEGASLFQIDSKEEMEFISSIGKLKGGNKYWVGVFQDGISGSWFWEDGSSPLSDLLPAERQRSAGQICGYLKDSTLISDKCDSWKYFICEKKAFGSCI

SEQ ID NO: 3 - protein, 241 aa, Pan troglodytes
MHEEEIYTSLQWDSPAPDTYQKCLSSNKCSGACCLVMVISCVFCMGLLTASIFLGVKLLQVSTIAMQQQEKLIQQERALLNFTEWKRSCALQMKYCQAFMQNSLSSAHNSSPCPNSWIQNRESCYYVSEIWSIWHTSQENCLKEGSTLLQIESKEEMDFITGSLRKIKGSYDYWVGLSQDGHSGRWLWQDGSSPSPGLLPVERSQSANQVCGYMKSNSLLSSNCSTWKYFICEKYALRSSV

SEQ ID NO: 4 - protein, 241 aa, Macaca mulatta
MHEEEIYTSLQWDSPAPNTYQKCLSSNKCSGAWCLVMAISCIFCMGLLTASIFLGVKLLQVSTIAMQQQEKLIQQERALLNFTEWKRSHVLQMKFCQTFMQSSFSSAHNCSPCPNNWIQNRESCYYVSEHWKIWHTSQENCLKEGSTLLQIESEEEMDFITGSLRKIRGSYDYWVGLSQDGHSGRWLWQDGSSPSPGLLPVEISQSTNQVCGYIKNSSLLSSNCSTWKYFICEKYALRSSV

SEQ ID NO: 5 - protein, 241 aa, Canis familiaris
MQEEETYTSLRWDSPTPSFYQKHLSSTKYSGAWCLVTVITCILCVGSIATSVFLGLKLFQVSTIAMKQREKLILQDRALLNFTQWERNHNLQMKYCQTLMQNSFSSAHNCSPCPDNWIQNGESCYHVFENWKIWHTSKEDCLKEGSNLLQIDSKEEMDFITGSLKKVKSGFDYWVGLSQDGLSKPWLWQDGSSPSPDLSPVQTLQSTNQLCGYLKDKFLSSANCSIWKYFICEKYALRSSN

SEQ ID NO: 6 - protein, 241 aa, Bos taurus
MQEDEIYTSLQWDTPTSNPYQKHLSSTKNSGVWCLVMVILCIFCIGSLATSIFLGIKLFQMSTTIMKQQEKLIQQERALLNFTQWKRNPNLQMTYCQTLMQKSLSSAYNCSPCPDNWIQNGESCYHVFESWTFWHTSRKDCWKKGSDLLQIESKEEMDFITGSLKKIKRNYDYWVGLSQNGSNQPWLWQDGSSPSADLLPRQGPQSTNQVCGYLRDNDLSSANCSVWKYFICEKYALRSST

SEQ ID NO: 7 - protein, 240 aa, Equus caballus
MQEEEMYTSLQWDNPTSNPYQKNLPSKCSGTRCLVIVISCIFCMGLLTTSIFLGIKLFQVSAIAVKQQEKLIQQERTLLNFTQCNRNHDFQMKCCQILMKNSLNSAHHCSPCPDNWIQNGESCYYVFENHKTWHTSKQVCLKEGSNLLQIDNKEEMDFITGSLKRIKSSYDYWVGLSQDGLSGPWLWQDGSSLSPDLWPVQRPQSPNLVCGYLKNKILFSANCSSWKHFICEKYALRSCI

SEQ ID NO: 8 - protein, 241 aa, Rattus norvegicus
MHEEEIYTSLQWDIPTSEASQKCPSLSKCPGTWCIVTVISCVVCVGLLAASIFLGIKFSQVSSLVMEQRERLIRQDTALLNLTEWQRNHTLQLKSCQASLQRSLRSGSNCNPCPPNWIQNGKSCYYAFDRWETWNNSKKSCLKEGDSLLQIDSKEEMEFINLSIWKLKGGYEYWVGVFQDGPSGSWFWEDGSSPLSDLLPTDRQLSASQICGYLKDHTLISDNCSNWKYFICEKKAFGSCI

SEQ ID NO: 9 - DNA, 726 bp, Homo sapiens
atgcacgaggaagaaatatacacctctcttcagtgggatagcccagcaccagacacttaccagaaatgtctgtcttccaacaaatgttcaggagcatgctgtcttgtgatggtgatttcatgtgttttctgcatgggattattaacagcatccattttcttgggcgtcaagttgttgcaggtgtccaccattgcgatgcagcagcaagaaaaactcatccaacaagagagggcactgctaaactttacagaatggaagagaagctgtgcccttcagatgaaatattgccaagccttcatgcaaaactcattaagttcagcccataacagcagtccttgtccaaacaattggattcagaacagagaaagttgttactatgtctctgaaatttggagcatttggcacaccagtcaagagaattgtttaaaggaaggttccacgctgctacaaatagagagcaaagaagaaatggattttatcactggcagcttgaggaagattaaaggaagctatgattactgggtggggttgtctcaggatggacacagcggacgctggctttggcaagatggctcctctccttctcctggcctgttgccagcagagagatcccagtcagctaaccaagtctgtggatacgtgaaaagcaattcccttctttcgtctaactgcagcacgtggaagtattttatctgtgagaagtatgcgttgagatcctctgtctga

SEQ ID NO: 10 - DNA, 795 bp, Mus musculus
atgcatgcggaagaaatatatacctctcttcagtgggacattcctacctcagaggcctctcagaagtgccaatcccctagcaaatgttcaggagcatggtgtgttgtgacgatgatttcctgtgtggtctgtatgggcttgttagcaacgtccattttcttgggcatcaagttcttccaggtatcctctcttgtcttggagcagcaggaaagactcatccaacaggacacagcattggtgaaccttacacagtggcagaggaaatacacactggaatactgccaagccttactgcagagatctctccattcaggcacagatgcttctactggaccagttcttctgacctctccacagatggttccacagaccctggacagcaaggaaacaggtagtgactgcagcccttgtccacacaactggattcagaatggaaaaagttgttactatgtctttgaacgctgggaaatgtggaacatcagtaagaagagctgtttaaaagagggcgctagtctctttcaaatagacagcaaagaagaaatggagttcatcagcagtatagggaaactcaaaggaggaaataaatattgggtgggagtgtttcaagatggaatcagtggatcttggttctgggaagatggctcttctcctctctctgacttgttgccagcagaaagacagcgatcagccggccagatctgtggatacctcaaagattctactctcatctcagataagtgcgatagctggaaatattttatctgtgagaagaaggcatttggatcctgcatctga

SEQ ID NO: 11 - DNA, 726 bp, Pan troglodytes
atgcacgaggaagaaatatacacctctcttcagtgggatagcccagcaccagacacttaccagaaatgtctgtcttccaacaaatgttcaggagcatgctgtcttgtgatggtgatttcatgtgttttctgcatgggattattaacagcatccattttcttgggcgtcaagttgttgcaggtgtccaccattgcgatgcagcagcaagaaaaactcatccaacaagagagggcactgctaaactttacagaatggaagagaagctgtgcccttcagatgaaatattgccaagccttcatgcaaaactcattaagttcagcccataacagcagtccttgtccaaacagttggattcagaacagagaaagttgttactatgtctctgaaatttggagcatttggcacaccagtcaagagaattgtttaaaggaaggttccacgctgctacaaatagagagcaaagaagaaatggattttatcactggcagtttgagaaagattaaaggaagctatgattactgggtggggttgtctcaggatggacacagcggacgctggctttggcaagatggctcctctccttctcctggcctgttgccagtagagagatcccagtcagctaaccaagtctgtggatacatgaaaagcaattcccttctttcgtctaactgcagcacttggaagtattttatctgtgagaagtatgcgttgagatcctctgtctga

SEQ ID NO: 12 - DNA, 726 bp, Macaca mulatta
atgcatgaggaagaaatatacacctctcttcagtgggatagtccagcaccaaacacttaccagaaatgtctgtcttctaacaaatgttcaggagcatggtgtcttgtgatggcgatttcatgtattttctgcatggggttattaacagcatccattttcttgggcgtcaagttgttgcaggtgtccaccattgcaatgcagcagcaagaaaaactcatccaacaagagagggcactgctaaactttacagaatggaagagaagccatgtccttcagatgaaattttgtcaaaccttcatgcaaagctcttttagttcagcccataactgcagtccttgtccaaacaattggattcagaacagagaaagctgttactatgtctctgaacattggaaaatttggcacaccagtcaagagaattgtttaaaggaaggttccacgctgctacaaatagagagcgaagaagaaatggattttatcactggcagcttgaggaagattagaggaagctacgattactgggtggggttgtctcaggatggacacagcggacgctggctttggcaagatggctcctctccttctcctggcctgttgccagtagagatatcccagtcaaccaaccaagtctgtggatacatcaaaaacagttcccttctttcgtctaactgcagcacttggaagtattttatctgcgagaagtatgcattaagatcctctgtctga

SEQ ID NO: 13 - DNA, 726 bp, Canis familiaris
atgcaggaggaagaaacatacacctctcttcgttgggatagtccaacaccaagcttttaccagaaacacctatcttccaccaaatattcaggagcatggtgtctggtgacggtgattacatgtattctctgcgtgggctcaatagcaacctctgttttcttgggcctcaagttgttccaggtatctaccattgcaatgaaacagcgagaaaagctcatccttcaggacagagcactgttgaatttcacacaatgggagagaaaccataaccttcagatgaaatattgccaaaccttgatgcaaaactctttcagttcagcccacaactgcagcccttgtcctgacaactggattcagaatggagaaagttgttaccatgtctttgaaaactggaaaatttggcacaccagtaaggaggactgtttgaaggagggctctaatcttctacaaatagacagcaaagaagaaatggactttatcactggcagcctgaagaaggtcaaaagtggctttgattactgggtgggactgtctcaagacggactcagcaaaccttggctttggcaagatggttcctctccctcccctgacctgtcgccagtacagacattgcaatcaactaaccagctctgtggatatctaaaggacaagttcctttcttctgctaactgcagcatttggaaatattttatctgtgagaagtatgcattgagatcctctaactga

SEQ ID NO: 14 - DNA, 726 bp, Bos taurus
atgcaagaggatgaaatatacacctctcttcagtgggatactccaacatcaaacccttatcagaaacatctgtcttctaccaaaaattcaggagtatggtgtcttgtgatggtgatcttatgtattttctgcattggctcattagcaacctctattttcttgggcatcaaattgtttcagatgtccactactataatgaagcagcaagaaaaactcatccaacaggagagagcactgctcaacttcacacagtggaagagaaaccccaacctacagatgacatattgccaaaccttaatgcagaagtctctcagttcagcctataactgcagcccttgtccagacaactggattcagaatggagaaagttgttatcatgtctttgaaagctggacattctggcacactagtagaaaggattgttggaagaagggctctgatcttctgcaaatagagagcaaagaagaaatggactttatcacgggcagcctgaagaagatcaagagaaactatgattactgggtaggactgtcacagaatgggtccaaccaaccttggctttggcaggatggctcctctccttctgctgacctgttgccaagacagggaccccagtcaacaaatcaggtctgtggatacctcagagacaacgacctttcttctgctaactgcagcgtttggaaatatttcatctgtgagaagtacgcactaagatcttctacctga

SEQ ID NO: 15 - DNA, 723 bp, Equus caballus
atgcaggaggaagaaatgtacacctctctccaatgggataacccaacatcaaacccttaccagaaaaatctgccttccaaatgttcaggaacacggtgtcttgtgatagtgatttcatgtattttctgcatgggcttgttaacaacgtccattttcttgggcatcaagttgttccaggtgtctgctattgcagtgaagcagcaagaaaaactcatccaacaggagagaacactgttgaacttcacacagtgtaatagaaaccatgacttccagatgaaatgctgtcaaatcctcatgaaaaactcattaaattcagcccatcactgcagcccttgtccagacaactggattcagaatggagaaagttgttactatgtctttgaaaatcacaaaacttggcataccagtaaacaggtttgtttgaaggagggctctaatcttctacaaatagacaacaaagaagaaatggactttatcacaggcagcctgaagaggatcaaaagcagctatgattactgggtgggactgtctcaggacggactcagcggaccttggctttggcaagatggttcttctctttccccagacctgtggccagtacagagaccgcaatcacctaacctggtctgtggatacctcaaaaacaagatccttttttcagctaactgcagcagttggaaacattttatctgtgagaagtatgcattaagatcttgcatctga

SEQ ID NO: 16 - DNA, 726 bp, Rattus norvegicus
atgcatgaggaagaaatatacacctctcttcagtgggacattccaacctcagaggcctctcagaagtgtccatcccttagcaaatgtccaggaacatggtgtattgtgacggtgatttcctgtgtggtctgtgtgggcttactagcagcatccattttcttgggcatcaagttctcccaggtgtcctctcttgtaatggagcagcgggaaaggctcatccgacaggacacagcattgctgaacctcacagagtggcagaggaaccatacactgcagttaaaaagctgccaagcctcactacaaagatctctccgttcaggcagtaactgcaacccttgtccaccgaactggattcagaatggaaaaagttgttactatgcctttgaccgctgggaaacgtggaacaacagtaagaagagttgtttaaaagagggcgatagtctccttcaaatagacagcaaagaagaaatggagtttatcaacctcagtatatggaagctcaaaggaggatatgaatactgggtgggagtgtttcaagatggacccagtggatcttggttttgggaagatggctcttctcctctctctgacttgttgccaacagacagacagctatcagccagccagatctgtggatacctcaaagaccatactctcatctcggataactgcagtaactggaaatattttatctgtgagaagaaggcatttggatcctgcatctga

SEQ ID NO: 17 - DNA, 22 bp, Artificial
  Oligonucleotide primer
tgtgactgctcccacaactgga

SEQ ID NO: 18 - DNA, 22 bp, Artificial
  Oligonucleotide primer
tttgcaccaatcacagcacaga

SEQ ID NO: 19 - DNA, 22 bp, Artificial
  Oligonucleotide primer
catttgcagtggcaaagtggag

SEQ ID NO: 20 - DNA, 22 bp, Artificial
  Oligonucleotide primers
gtctcgctcctggaagatggtg

SEQ ID NO: 21 - DNA, 26 bp, Artificial
  Oligonucleotide primer
gccatttcttgtaccaacctactcct

SEQ ID NO: 22 - DNA, 23 bp, Artificial
  Oligonucleotide primer
cggtgtggtatggatcgtcactt

SEQ ID NO: 23 - DNA, 22 bp, Artificial
  Oligonucleotide primer
agcctcctgtgtggactgcttt

SEQ ID NO: 24 - DNA, 22 bp, Artificial
  Oligonucleotide primer
ttcatggcccacattttggttt

SEQ ID NO: 25 - DNA, 33 bp, Artificial
  Oligonucleotide primer
tagtagacgcgtgagcagcaggaaagactcatc

SEQ ID NO: 26 - DNA, 33 bp, Artificial
  Oligonucleotide primer
tagtagacgcgttcagatgcaggatccaaatgc

SEQ ID NO: 27 - DNA, 33 bp, Artificial
  Oligonucleotide primer
tagtagacgcgtcagcagcaagaaaaactcatc

SEQ ID NO: 28 - DNA, 33 bp, Artificial
  Oligonucleotide primer
tagtagacgcgttcagacagaggatctcaacgc

SEQ ID NO: 29 - protein, 22 aa, Artificial
  Antigenic fragment of murine 5B6
DGSSPLSDLLPAERQRSAGQIC

SEQ ID NO: 30 - protein, 27 aa, Artificial
  Antigenic fragment of human 5B6
RWLWQDGSSPSPGLLPAERSQSANQVC

SEQ ID NO: 31 - protein, 18 aa, Artificial
  Biotinylation consensus sequence
NSGLHHILDAQKMVWNHR

SEQ ID NO: 32 - protein, 136 aa, Mus musculus
PCPKGSEWYKDSCYSQLNQYGTWQESVMACSARNASLLKVKNKDVLEFIKYKKLRYFWLALLPRKDRTQYPLSEKMFLSEESERSTDDIDKKYCGYIDRVNVYYTYCTDENNIICEETASKVQLESVLNGLPEDSR

SEQ ID NO: 33 - protein, 127 aa, Mus musculus
SCLPNWIMHGKSCYLFSFSGNSWYGSKRHCSQLGAHLLKIDNSKEFEFIESQTSSHRINAFWIGLSRNQSEGPWFWEDGSAFFPNSFQVRNTVPQESLLHNCVWIHGSEVYNQICNTSSYSICEKEL

SEQ ID NO: 34 - protein, 130 aa, Mus musculus
PCPQDWLWHKENCYLFHGPFSWEKNRQTCQSLGGQLLQINGADDLTFILQAISHTTSPFWIGLHRKKPGQPWLWENGTRLNFQFFKTRGVSLQLYSSGNCAYLQDGAVFAENCILIAFSICQKKTNHLQI

SEQ ID NO: 35 - protein, 119 aa, Mus musculus
PCPNNWICHRNNCYQFFNEEKTWNQSQASCLSQNSSLLKIYSKEEQDFLKLVKSYHWMGLVQIPANGSWQWEDGSSLSYNQLTLVEIPKGSCAVYGSSFKAYTEDCANLNTYICMKRAV

SEQ ID NO: 36 - protein, 119 aa, Homo sapiens
PCPKNWICYKNNCYQFFDESKNWYESQASCMSQNASLLKVYSKEDQDLLKLVKSYHWMGLVHIPTNGSWQWEDGSILSPNLLTIIEMQKGDCALYASSFKGYIENCSTPNTYICMQRTV

SEQ ID NO: 37 - protein, 123 aa, Rattus rattus
HAFSMGKKSGKKFFVTNHERMPFSKVKALCSELRGTVAIPRNAEENKAIQEVAKTSAFLGITDEVTEGQFMYVTGGRLTYSNWKKDEPNDHGSGEDCVTIVDNGLWNDISCQASHTAVCEFPA

SEQ ID NO: 38 - DNA, 33 bp, Artificial Sequence
  Oligonucleotide primer
tagtagacgcgtggtagtgactgcagcccttgt

SEQ ID NO: 39 - DNA, 36 bp, Artificial Sequence
  Oligonucleotide primer
tagtagacgcgtaacagcagtccttgtccaaacaat

SEQ ID NO: 40 - protein, 198 aa, Artificial Sequence
  Soluble mouse 5B6 including stalk
EQQERLIQQDTALVNLTQWQRKYTLEYCQALLQRSLHSGTDASTGPVLLTSPQMVPQTLDSKETGSDCSPCPHNWIQNGKSCYYVFERWEMWNISKKSCLKEGASLFQIDSKEEMEFISSIGKLKGGNKYWVGVFQDGISGSWFWEDGSSPLSDLLPAERQRSAGQICGYLKDSTLISDKCDSWKYFICEKKAFGSCI

SEQ ID NO: 41 - protein, 175 aa, Artificial Sequence
  Soluble human 5B6 including stalk
QQQEKLIQQERALLNFTEWKRSCALQMKYCQAFMQNSLSSAHNSSPCPNNWIQNRESCYYVSEIWSIWHTSQENCLKEGSTLLQIESKEEMDFITGSLRKIKGSYDYWVGLSQDGHSGRWLWQDGSSPSPGLLPAERSQSANQVCGYVKSNSLLSSNCSTWKYFICEKYALRSSV

SEQ ID NO: 42 - protein, 134 aa, Artificial Sequence
  Soluble mouse 5B6 without stalk
GSDCSPCPHNWIQNGKSCYYVFERWEMWNISKKSCLKEGASLFQIDSKEEMEFISSIGKLKGGNKYWVGVFQDGISGSWFWEDGSSPLSDLLPAERQRSAGQICGYLKDSTLISDKCDSWKYFICEKKAFGSCI

SEQ ID NO: 43 - protein, 133 aa, Artificial Sequence
  Soluble human 5B6 without stalk
NSSPCPNNWIQNRESCYYVSEIWSIWHTSQENCLKEGSTLLQIESKEEMDFITGSLRKIKGSYDYWVGLSQDGHSGRWLWQDGSSPSPGLLPAERSQSANQVCGYVKSNSLLSSNCSTWKYFICEKYALRSSV

SEQ ID NO: 44 - protein, 263 aa, Artificial Sequence
  Soluble flag tagged mouse 5B6 including stalk
MVLASSTTSIHTMLLLLLMLFHLGLQASISARQNSGLHHILDAQKMVWNHRGARQDYKDDDDKTREQQERLIQQDTALVNLTQWQRKYTLEYCQALLQRSLHSGTDASTGPVLLTSPQMVPQTLDSKETGSDCSPCPHNWIQNGKSCYYVFERWEMWNISKKSCLKEGASLFQIDSKEEMEFISSIGKLKGGNKYWVGVFQDGISGSWFWEDGSSPLSDLLPAERQRSAGQICGYLKDSTLISDKCDSWKYFICEKKAFGSCI

SEQ ID NO: 45 - protein, 240 aa, Artificial Sequence
  Soluble flag tagged human 5B6 including stalk
MVLASSTTSIHTMLLLLLMLFHLGLQASISARQNSGLHHILDAQKMVWNHRGARQDYKDDDDKTRQQQEKLIQQERALLNFTEWKRSCALQMKYCQAFMQNSLSSAHNSSPCPNNWIQNRESCYYVSEIWSIWHTSQENCLKEGSTLLQIESKEEMDFITGSLRKIKGSYDYWVGLSQDGHSGRWLWQDGSSPSPGLLPAERSQSANQVCGYVKSNSLLSSNCSTWKYFICEKYALRSSV

SEQ ID NO: 46 - protein, 199 aa, Artificial Sequence
  Soluble flag tagged mouse 5B6 without stalk
MVLASSTTSIHTMLLLLLMLFHLGLQASISARQNSGLHHILDAQKMVWNHRGARQDYKDDDDKTRGSDCSPCPHNWIQNGKSCYYVFERWEMWNISKKSCLKEGASLFQIDSKEEMEFISSIGKLKGGNKYWVGVFQDGISGSWFWEDGSSPLSDLLPAERQRSAGQICGYLKDSTLISDKCDSWKYFICEKKAFGSCI

SEQ ID NO: 47 - protein, 198 aa, Artificial Sequence
  Soluble flag tagged human 5B6 without stalk
MVLASSTTSIHTMLLLLLMLFHLGLQASISARQNSGLHHILDAQKMVWNHRGARQDYKDDDDKTRNSSPCPNNWIQNRESCYYVSEIWSIWHTSQENCLKEGSTLLQIESKEEMDFITGSLRKIKGSYDYWVGLSQDGHSGRWLWQDGSSPSPGLLPAERSQSANQVCGYVKSNSLLSSNCSTWKYFICEKYALRSSV

SEQ ID NO: 48 - protein, 2419 aa, Homo sapiens
MEQFPKETVVESSGPKVLETAEEIQERRQEVLTRYQSFKERVAERGQKLEDSYHLQVFKRDADDLGKWIMEKVNILTDKSYEDPTNIQGKYQKHQSLEAEVQTKSRLMSELEKTREERFTMGHSAHEETKAHIEELRHLWDLLLELTLEKGDQLLRALKFQQYVQECADILEWIGDKEAIATSVELGEDWERTEVLHKKFEDFQVELVAKEGRVVEVNQYANECAEENHPDLPLIQSKQNEVNAAWERLRGLALQRQKALSNAANLQRFKRDVTEAIQWIKEKEPVLTSEDYGKDLVASEGLFHSHKGLERNLAVMSDKVKELCAKAEKLTLSHPSDAPQIQEMKEDLVSSWEHIRALATSRYEKLQATYWYHRFSSDFDELSGWMNEKTAAINADELPTDVAGGEVLLDRHQQHKHEIDSYDDRFQSADETGQDLVNANHEASDEVREKMEILDNNWTALLELWDERHRQYEQCLDFHLFYRDSEQVDSWMSRQEAFLENEDLGNSLGSAEALLQKHEDFEEAFTAQEEKIITVDKTATKLIGDDHYDSENIKAIRDGLLARRDALREKAATRRRLLKESLLLQKLYEDSDDLKNWINKKKKLADDEDYKDIQNLKSRVQKQQVFEKELAVNKTQLENIQKTGQEMIEGGHYASDNVTTRLSEVASLWEELLEATKQKGTQLHEANQQLQFENNAEDLQRWLEDVEWQVTSEDYGKGLAEVQNRLRKHGLLESAVAARQDQVDILTDLAAYFEEIGHPDSKDIRARQESLVCRFEALKEPLATRKKKLLDLLHLQLICRDTEDEEAWIQETEPSATSTYLGKDLIASKKLLNRHRVILENIASHEPRIQEITERGNKMVEEGHFAAEDVASRVKSLNQNMESLRARAARRQNDLEANVQFQQYLADLHEAETWIREKEPIVDNTNYGADEEAAGALLKKHEAFLLDLNSFGDSMKALRNQANACQQQQAAPVEGVAGEQRVMALYDFQARSPREVTMKKGDVLTLLSSINKDWWKVEAADHQGIVPAVYVRRLAHDEFPMLPQRRREEPGNITQRQEQIENQYRSLLDRAEERRRRLLQRYNEFLLAYEAGDMLEWIQEKKAENTGVELDDVWELQKKFDEFQKDLNTNEPRLRDINKVADDLLFEGLLTPEGAQIRQELNSRWGSLQRLADEQRQLLGSAHAVEVFHREADDTKEQIEKKCQALSAADPGSDLFSVQALQRRHEGFERDLVPLGDKVTILGETAERLSESHPDATEDLQRQKMELNEAWEDLQGRTKDRKESLNEAQKFYLFLSKARDLQNWISSIGGMVSSQELAEDLTGIEILLERHQEHRADMEAEAPTFQALEDFSAELIDSGHHASPEIEKKLQAVKLERDDLEKAWEKRKKILDQCLELQMFQGNCDQVESWMVARENSLRSDDKSSLDSLEALMKKRDDLDKAITAQEGKITDLEHFAESLIADEHYAKEEIATRLQRVLDRWKALKAQLIDERTKLGDYANLKQFYRDLEELEEWISEMLPTACDESYKDATNIQRKYLKHQTFAHEVDGRSEQVHGVINLGNSLIECSACDGNEEAMKEQLEQLKEHWDHLLERTNDKGKKLNEASRQQRFNTSIRDFEFWLSEAETLLAMKDQARDLASAGNLLKKHQLLEREMLAREDALKDLNTLAEDLLSSGTFNVDQIVKKKDNVNKRFLNVQELAAAHHEKLKEAYALFQFFQDLDDEESWIEEKLIRVSSQDYGRDLQGVQNLLKKHKRLEGELVAHEPAIQNVLDMAEKLKDKAAVGQEEIQLRLAQFVEHWEKLKELAKARGLKLEESLEYLQFMQNAEEEEAWINEKNALAVRGDCGDTLAATQSLLMKHEALENDFAVHETRVQNVCAQGEDILNKVLQEESQNKEISSKIEALNEKTPSLAKAIAAWKLQLEDDYAFQEFNWKADVVEAWIADKETSLKTNGNGADLGDFLTLLAKQDTLDASLQSFQQERLPEITDLKDKLISAQHNQSKAIEERYAALLKRWEQLLEASAVHRQKLLEKQLPLQKAEDLFVEFAHKASALNNWCEKMEENLSEPVHCVSLNEIRQLQKDHEDFLASLARAQADFKCLLELDQQIKALGVPSSPYTWLTVEVLERTWKHLSDIIEEREQELQKEEARQVKNFEMCQEFEQNASTFLQWILETRAYFLDGSLLKETGTLESQLEANKRKQKEIQAMKRQLTKIVDLGDNLEDALILDIKYSTIGLAQQWDQLYQLGLRMQHNLEQQIQAKDIKGVSEETLKEFSTIYKHFDENLTGRLTHKEFRSCLRGLNYYLPMVEEDEHEPKFEKFLDAVDPGRKGYVSLEDYTAFLIDKESENIKSSDEIENAFQALAEGKSYITKEDMKQALTPEQVSFCATHMQQYMDPRGRSHLSGYDYVGFTNSYFGN

SEQ ID NO: 49 - protein, 2477 aa, Homo sapiens
MDPSGVKVLETAEDIQERRQQVLDRYHRFKELSTLRRQKLEDSYRFQFFQRDAEELEKWIQEKLQIASDENYKDPTNLQGKLQKHQAFEAEVQANSGAIVKLDETGNLMISEGHFASETIRTRLMELHRQWELLLEKMREKGIKLLQAQKLVQYLRECEDVMDWINDKEAIVTSEELGQDLEHVEVLQKKFEEFQTDMAAHEERVNEVNQFAAKLIQEQHPEEELIKTKQDEVNAAWQRLKGLALQRQGKLFGAAEVQRFNRDVDETISWIKEKEQLMASDDFGRDLASVQALLRKHEGLERDLAALEDKVKALCAEADRLQQSHPLSATQIQVKREELITNWEQIRTLAAERHARLNDSYRLQRFLADFRDLTSWVTEMKALINADELASDVAGAEALLDRHQEHKGEIDAHEDSFKSADESGQALLAAGHYASDEVREKLTVLSEERAALLELWELRRQQYEQCMDLQLFYRDTEQVDNWMSKQEAFLLNEDLGDSLDSVEALLKKHEDFEKSLSAQEEKITALDEFATKLIQNNHYAMEDVATRRDALLSRRNALHERAMRRRAQLADSFHLQQFFRDSDELKSWVNEKMKTATDEAYKDPSNLQGKVQKHQAFEAELSANQSRIDALEKAGQKLIDVNHYAKDEVAARMNEVISLWKKLLEATELKGIKLREANQQQQFNRNVEDIELWLYEVEGHLASDDYGKDLTNVQNLQKKHALLEADVAAHQDRIDGITIQARQFQDAGHFDAENIKKKQEALVARYEALKEPMVARKQKLADSLRLQQLFRDVEDEETWIREKEPIAASTNRGKDLIGVQNLLKKHQALQAEIAGHEPRIKAVTQKGNAMVEEGHFAAEDVKAKLHELNQKWEALKAKASQRRQDLEDSLQAQQYFADANEAESWMREKEPIVGSTDYGKDEDSAEALLKKHEALMSDLSAYGSSIQALREQAQSCRQQVAPTDDETGKELVLALYDYQEKSPREVTMKKGDILTLLNSTNKDWWKVEVNDRQGFVPAAYVKKLDPAQSASRENLLEEQGSIALRQEQIDNQTRITKEAGSVSLRMKQVEELYHSLLELGEKRKGMLEKSCKKFMLFREANELQQWINEKEAALTSEEVGADLEQVEVLQKKFDDFQKDLKANESRLKDINKVAEDLESEGLMAEEVQAVQQQEVYGMMPRDETDSKTASPWKSARLMVHTVATFNSIKELNERWRSLQQLAEERSQLLGSAHEVQRFHRDADETKEWIEEKNQALNTDNYGHDLASVQALQRKHEGFERDLAALGDKVNSLGETAERLIQSHPESAEDLQEKCTELNQAWSSLGKRADQRKAKLGDSHDLQRFLSDFRDLMSWINGIRGLVSSDELAKDVTGAEALLERHQEHRTEIDARAGTFQAFEQFGQQLLAHGHYASPEIKQKLDILDQERADLEKAWVQRRMMLDQCLELQLFHRDCEQAENWMAAREAFLNTEDKGDSLDSVEALIKKHEDFDKAINVQEEKIAALQAFADQLIAAGHYAKGDISSRRNEVLDRWRRLKAQMIEKRSKLGESQTLQQFSRDVDEIEAWISEKLQTASDESYKDPTNIQLSKLLSKHQKHQAFEAELHANADRIRGVIDMGNSLIERGACAGSEDAVKARLAALADQWQFLVQKSAEKSQKLKEANKQQNFNTGIKDFDFWLSEVEALLASEDYGKDLASVNNLLKKHQLLEADISAHEDRLKDLNSQADSLMTSSAFDTSQVKDKRDTINGRFQKIKSMAASRRAKLNESHRLHQFFRDMDDEESWIKEKKLLVGSEDYGRDLTGVQNLRKKHKRLEAELAAHEPAIQGVLDTGKKLSDDNTIGKEEIQQRLAQFVEHWKELKQLAAARGQRLEESLEYQQFVANVEEEEAWINEKMTLVASEDYGDTLAAIQGLLKKHEAFETDFTVHKDRVNDVCTNGQDLIKKNNHHEENISSKMKGLNGKVSDLEKAAAQRKAKLDENSAFLQFNWKADVVESWIGEKENSLKTDDYGRDLSSVQTLLTKQETFDAGLQAFQQEGIANITALKDQLLAAKHVQSKAIEARHASLMKRWSQLLANSAARKKKLLEAQSHFRKVEDLFLTFAKKASAFNSWFENAEEDLTDPVRCNSLEEIKALREAHDAFRSSLSSAQADFNQLAELDRQIKSFRVASNPYTWFTMEALEETWRNLQKIIKERELELQKEQRRQEENDKLRQEFAQHANAFHQWIQETRTYLLDGSCMVEESGTLESQLEATKRKHQEIRAMRSQLKKIEDLGAAMEEALILDNKYTEHSTVGLAQQWDQLDQLGMRMQHNLEQQIQARNTTGVTEEALKEFSMMFKHFDKDKSGRLNHQEFKSCLRSLGYDLPMVEEGEPDPEFEAILDTVDPNRDGHVSLQEYMAFMISRETENVKSSEEIESAFRALSSEGKPYVTKEELYQNLTREQADYCVSHMKPYVDGKGRELPTAFDYVEFTRSLFVN

SEQ ID NO: 50 - protein, 2472 aa, Homo sapiens
MDPSGVKVLETAEDIQERRQQVLDRYHRFKELSTLRRQKLEDSYRFQFFQRDAEELEKWIQEKLQIASDENYKDPTNLQGKLQKHQAFEAEVQANSGAIVKLDETGNLMISEGHFASETIRTRLMELHRQWELLLEKMREKGIKLLQAQKLVQYLRECEDVMDWINDKEAIVTSEELGQDLEHVEVLQKKFEEFQTDMAAHEERVNEVNQFAAKLIQEQHPEEELIKTKQDEVNAAWQRLKGLALQRQGKLFGAAEVQRFNRDVDETISWIKEKEQLMASDDFGRDLASVQALLRKHEGLERDLAALEDKVKALCAEADRLQQSHPLSATQIQVKREELITNWEQIRTLAAERHARLNDSYRLQRFLADFRDLTSWVTEMKALINADELASDVAGAEALLDRHQEHKGEIDAHEDSFKSADESGQALLAAGHYASDEVREKLTVLSEERAALLELWELRRQQYEQCMDLQLFYRDTEQVDNWMSKQEAFLLNEDLGDSLDSVEALLKKHEDFEKSLSAQEEKITALDEFATKLIQNNHYAMEDVATRRDALLSRRNALHERAMRRRAQLADSFHLQQFFRDSDELKSWVNEKMKTATDEAYKDPSNLQGKVQKHQAFEAELSANQSRIDALEKAGQKLIDVNHYAKDEVAARMNEVISLWKKLLEATELKGIKLREANQQQQFNRNVEDIELWLYEVEGHLASDDYGKDLTNVQNLQKKHALLEADVAAHQDRIDGITIQARQFQDAGHFDAENIKKKQEALVARYEALKEPMVARKQKLADSLRLQQLFRDVEDEETWIREKEPIAASTNRGKDLIGVQNLLKKHQALQAEIAGHEPRIKAVTQKGNAMVEEGHFAAEDVKAKLHELNQKWEALKAKASQRRQDLEDSLQAQQYFADANEAESWMREKEPIVGSTDYGKDEDSAEALLKKHEALMSDLSAYGSSIQALREQAQSCRQQVAPTDDETGKELVLALYDYQEKSPREVTMKKGDILTLLNSTNKDWWKVEVNDRQGFVPAAYVKKLDPAQSASRENLLEEQGSIALRQEQIDNQTRITKEAGSVSLRMKQVEELYHSLLELGEKRKGMLEKSCKKFMLFREANELQQWINEKEAALTSEEVGADLEQVEVLQKKFDDFQKDLKANESRLKDINKVAEDLESEGLMAEEVQAVQQQEVYGMMPRDETDSKTASPWKSARLMVHTVATFNSIKELNERWRSLQQLAEERSQLLGSAHEVQRFHRDADETKEWIEEKNQALNTDNYGHDLASVQALQRKHEGFERDLAALGDKVNSLGETAERLIQSHPESAEDLQEKCTELNQAWSSLGKRADQRKAKLGDSHDLQRFLSDFRDLMSWINGIRGLVSSDELAKDVTGAEALLERHQEHRTEIDARAGTFQAFEQFGQQLLAHGHYASPEIKQKLDILDQERADLEKAWVQRRMMLDQCLELQLFHRDCEQAENWMAAREAFLNTEDKGDSLDSVEALIKKHEDFDKAINVQEEKIAALQAFADQLIAAGHYAKGDISSRRNEVLDRWRRLKAQMIEKRSKLGESQTLQQFSRDVDEIEAWISEKLQTASDESYKDPTNIQSKHQKHQAFEAELHANADRIRGVIDMGNSLIERGACAGSEDAVKARLAALADQWQFLVQKSAEKSQKLKEANKQQNFNTGIKDFDFWLSEVEALLASEDYGKDLASVNNLLKKHQLLEADISAHEDRLKDLNSQADSLMTSSAFDTSQVKDKRDTINGRFQKIKSMAASRRAKLNESHRLHQFFRDMDDEESWIKEKKLLVGSEDYGRDLTGVQNLRKKHKRLEAELAAHEPAIQGVLDTGKKLSDDNTIGKEEIQQRLAQFVEHWKELKQLAAARGQRLEESLEYQQFVANVEEEEAWINEKMTLVASEDYGDTLAAIQGLLKKHEAFETDFTVHKDRVNDVCTNGQDLIKKNNHHEENISSKMKGLNGKVSDLEKAAAQRKAKLDENSAFLQFNWKADVVESWIGEKENSLKTDDYGRDLSSVQTLLTKQETFDAGLQAFQQEGIANITALKDQLLAAKHVQSKAIEARHASLMKRWSQLLANSAARKKKLLEAQSHFRKVEDLFLTFAKKASAFNSWFENAEEDLTDPVRCNSLEEIKALREAHDAFRSSLSSAQADFNQLAELDRQIKSFRVASNPYTWFTMEALEETWRNLQKIIKERELELQKEQRRQEENDKLRQEFAQHANAFHQWIQETRTYLLDGSCMVEESGTLESQLEATKRKHQEIRAMRSQLKKIEDLGAAMEEALILDNKYTEHSTVGLAQQWDQLDQLGMRMQHNLEQQIQARNTTGVTEEALKEFSMMFKHFDKDKSGRLNHQEFKSCLRSLGYDLPMVEEGEPDPEFEAILDTVDPNRDGHVSLQEYMAFMISRETENVKSSEEIESAFRALSSEGKPYVTKEELYQNLTREQADYCVSHMKPYVDGKGRELPTAFDYVEFTRSLFVN

SEQ ID NO: 51 - protein, 2328 aa, Homo sapiens
MTSATEFENVGNQPPYSRINARWDAPDDELDNDNSSARLFERSRIKALADEREVVQKKTFTKWVNSHLARVSCRITDLYKDLRDGRMLIKLLEVLSGEMLPKPTKGKMRIHCLENVDKALQFLKEQRVHLENMGSHDIVDGNHRLVLGLIWTIILRFQIQDIVVQTQEGRETRSAKDALLLWCQMKTAGYPHVNVTNFTSSWKDGLAFNALIHKHRPDLIDFDKLKDSNARHNLEHAFNVAERQLGIIPLLDPEDVFTENPDEKSIITYVVAFYHYFSKMKVLAVEGKRVGKVIDHAIETEKMIEKYSGLASDLLTWIEQTITVLNSRKFANSLTGVQQQLQAFSTYRTVEKPPKFQEKGNLEVLLFTIQSRMRANNQKVYTPHDGKLVSDINRAWESLEEAEYRRELALRNELIRQEKLEQLARRFDRKAAMRETWLSENQRLVAQDNFGYDLAAVEAAKKKHEAIETDTAAYEERVRALEDLAQELEKENYHDQKRITARKDNILRLWSYLQELLQSRRQRLETTLALQKLFQDMLHSIDWMDEIKAHLLSAEFGKHLLEVEDLLQKHKLMEADIAIQGDKVKAITAATLKFTEGKGYQPCDPQVIQDRISHLEQCFEELSNMAAGRKAQLEQSKRLWKFFWEMDEAESWIKEKEQIYSSLDYGKDLTSVLILQRKHKAFEDELRGLDAHLEQIFQEAHGMVARKQFGHPQIEARIKEVSAQWDQLKDLAAFCKKNLQDAENFFQFQGDADDLKAWLQDAHRLLSGEDVGQDEGATRALGKKHKDFLEELEESRGVMEHLEQQAQGFPEEFRDSPDVTHRLQALRELYQQVVAQADLRQQRLQEALDLYTVFGETDACELWMGEKEKWLAEMEMPDTLEDLEVVQHRFDILDQEMKTLMTQIDGVNLAANSLVESGHPRSREVKQYQDHLNTRWQAFQTLVSERREAVDSALRVHNYCVDCEETSKWITDKTKVVESTKDLGRDLAGIIAIQRKLSGLERDVAAIQARVDALERESQQLMDSHPEQKEDIGQRQKHLEELWQGLQQSLQGQEDLLGEVSQLQAFLQDLDDFQAWLSITQKAVASEDMPESLPEAEQLLQQHAGIKDEIDGHQDSYQRVKESGEKVIQGQTDPEYLLLGQRLEGLDTGWNALGRMWESRSHTLAQCLGFQEFQKDAKQAEAILSNQEYTLAHLEPPDSLEAAEAGIRKFEDFLGSMENNRDKVLSPVDSGNKLVAEGNLYSDKIKEKVQLIEDRHRKNNEKAQEASVLLRDNLELQNFLQNCQELTLWINDKLLTSQDVSYDEARNLHNKWLKHQAFVAELASHEGWLENIDAEGKQLMDEKPQFTALVSQKLEALHRLWDELQATTKEKTQHLSAARSSDLRLQTHADLNKWISAMEDQLRSDDPGKDLTSVNRMLAKLKRVEDQVNVRKEELGELFAQVPSMGEEGGDADLSIEKRFLDLLEPLGRRKKQLESSRAKLQISRDLEDETLWVEERLPLAQSADYGTNLQTVQLFMKKNQTLQNEILGHTPRVEDVLQRGQQLVEAAEIDCQDLEERLGHLQSSWDRLREAAAGRLQRLRDANEAQQYYLDADEAEAWIGEQELYVISDEIPKDEEGAIVMLKRHLRQQRAVEDYGRNIKQLASRAQGLLSAGHPEGEQIIRLQGQVDKHYAGLKDVAEERKRKLENMYHLFQLKRETDDLEQWISEKELVASSPEMGQDFDHVTLLRDKFRDFARETGAIGQERVDNVNAFIERLIDAGHSEAATIAEWKDGLNEMWADLLELIDTRMQLLAASYDLHRYFYTGAEILGLIDEKHRELPEDVGLDASTAESFHRVHTAFERELHLLGVQVQQFQDVATRLQTAYAGEKAEAIQNKEQEVSAAWQALLDACAGRRTQLVDTADKFRFFSMARDLLSWMESIIRQIETQERPRDVSSVELLMKYHQGINAEIETRSKNFSACLELGESLLQRQHQASEEIREKLQQVMSRRKEMNEKWEARWERLRMLLEVCQFSRDASVAEAWLIAQEPYLASGDFGHTVDSVEKLIKRHEAFEKSTASWAERFAALEKPTTLELKERQIAERPAEETGPQEEEGETAGEAPVSHHAATERTSPGEEEGTWPQNLQQPPPPGQHKDGQKSTGDERPTTEPLFKVLDTPLSEGDEPATLPAPRDHGQSVQMEGYLGRKHDLEGPNKKASNRSWNNLYCVLRNSELTFYKDAKNLALGMPYHGEEPLALRHAICEIAANYKKKKHVFKLRLSNGSEWLFHGKDEEEMLSWLQGVSTAINESQSIRVKAQSLPLPSLSGPDASLGKKDKEKRFSFFPKKK

SEQ ID NO: 52 - protein, 2137 aa, Homo sapiens
MTSATEFENVGNQPPYSRINARWDAPDDELDNDNSSARLFERSRIKALADEREVVQKKTFTKWVNSHLARVSCRITDLYKDLRDGRMLIKLLEVLSGEMLPKPTKGKMRIHCLENVDKALQFLKEQRVHLENMGSHDIVDGNHRLVLGLIWTIILRFQIQDIVVQTQEGRETRSAKDALLLWCQMKTAGYPHVNVTNFTSSWKDGLAFNALIHKHRPDLIDFDKLKDSNARHNLEHAFNVAERQLGIIPLLDPEDVFTENPDEKSIITYVVAFYHYFSKMKVLAVEGKRVGKVIDHAIETEKMIEKYSGLASDLLTWIEQTITVLNSRKFANSLTGVQQQLQAFSTYRTVEKPPKFQEKGNLEVLLFTIQSRMRANNQKVYTPHDGKLVSDINRAWESLEEAEYRRELALRNELIRQEKLEQLARRFDRKAAMRETWLSENQRLVAQDNFGYDLAAVEAAKKKHEAIETDTAAYEERVRALEDLAQELEKENYHDQKRITARKDNILRLWSYLQELLQSRRQRLETTLALQKLFQDMLHSIDWMDEIKAHLLSAEFGKHLLEVEDLLQKHKLMEADIAIQGDKVKAITAATLKFTEGKGYQPCDPQVIQDRISHLEQCFEELSNMAAGRKAQLEQSKRLWKFFWEMDEAESWIKEKEQIYSSLDYGKDLTSVLILQRKHKAFEDELRGLDAHLEQIFQEAHGMVARKQFGHPQIEARIKEVSAQWDQLKDLAAFCKKNLQDAENFFQFQGDADDLKAWLQDAHRLLSGEDVGQDEGATRALGKKHKDFLEELEESRGVMEHLEQQAQGFPEEFRDSPDVTHRLQALRELYQQVVAQADLRQQRLQEALDLYTVFGETDACELWMGEKEKWLAEMEMPDTLEDLEVVQHRFDILDQEMKTLMTQIDGVNLAANSLVESGHPRSREVKQYQDHLNTRWQAFQTLVSERREAVDSALRVHNYCVDCEETSKWITDKTKVVESTKDLGRDLAGIIAIQRKLSGLERDVAAIQARVDALERESQQLMDSHPEQKEDIGQRQKHLEELWQGLQQSLQGQEDLLGEVSQLQAFLQDLDDFQAWLSITQKAVASEDMPESLPEAEQLLQQHAGIKDEIDGHQDSYQRVKESGEKVIQGQTDPEYLLLGQRLEGLDTGWNALGRMWESRSHTLAQCLGFQEFQKDAKQAEAILSNQEYTLAHLEPPDSLEAAEAGIRKFEDFLGSMENNRDKVLSPVDSGNKLVAEGNLYSDKIKEKVQLIEDRHRKNNEKAQEASVLLRDNLELQNFLQNCQELTLWINDKLLTSQDVSYDEARNLHNKWLKHQAFVAELASHEGWLENIDAEGKQLMDEKPQFTALVSQKLEALHRLWDELQATTKEKTQHLSAARSSDLRLQTHADLNKWISAMEDQLRSDDPGKDLTSVNRMLAKLKRVEDQVNVRKEELGELFAQVPSMGEEGGDADLSIEKRFLDLLEPLGRRKKQLESSRAKLQISRDLEDETLWVEERLPLAQSADYGTNLQTVQLFMKKNQTLQNEILGHTPRVEDVLQRGQQLVEAAEIDCQDLEERLGHLQSSWDRLREAAAGRLQRLRDANEAQQYYLDADEAEAWIGEQELYVISDEIPKDEEGAIVMLKRHLRQQRAVEDYGRNIKQLASRAQGLLSAGHPEGEQIIRLQGQVDKHYAGLKDVAEERKRKLENMYHLFQLKRETDDLEQWISEKELVASSPEMGQDFDHVTLLRDKFRDFARETGAIGQERVDNVNAFIERLIDAGHSEAATIAEWKDGLNEMWADLLELIDTRMQLLAASYDLHRYFYTGAEILGLIDEKHRELPEDVGLDASTAESFHRVHTAFERELHLLGVQVQQFQDVATRLQTAYAGEKAEAIQNKEQEVSAAWQALLDACAGRRTQLVDTADKFRFFSMARDLLSWMESIIRQIETQERPRDVSSVELLMKYHQGINAEIETRSKNFSACLELGESLLQRQHQASEEIREKLQQVMSRRKEMNEKWEARWERLRMLLEVCQFSRDASVAEAWLIAQEPYLASGDFGHTVDSVEKLIKRHEAFEKSTASWAERFAALEKPTTLELKERQIAERPAEETGPQEEEGETAGEAPVSHHAATERTSPVSLWSRLSSSWESLQPEPSHPY

SEQ ID NO: 53 - protein, 2364 aa, Homo sapiens
MTTTVATDYDNIEIQQQYSDVNNRWDVDDWDNENSSARLFERSRIKALADEREAVQKKTFTKWVNSHLARVSCRITDLYTDLRDGRMLIKLLEVLSGERLPKPTKGRMRIHCLENVDKALQFLKEQRVHLENMGSHDIVDGNHRLTLGLIWTIILRFQIQDISVETEDNKEKKSAKDALLLWCQMKTAGYPNVNIHNFTTSWRDGMAFNALIHKHRPDLIDFDKLKKSNAHYNLQNAFNLAEQHLGLTKLLDPEDISVDHPDEKSIITYVVTYYHYFSKMKALAVEGKRIGKVLDNAIETEKMIEKYESLASDLLEWIEQTIIILNNRKFANSLVGVQQQLQAFNTYRTVEKPPKFTEKGNLEVLLFTIQSKMRANNQKVYMPREGKLISDINKAWERLEKAEHERELALRNELIRQEKLEQLARRFDRKAAMRETWLSENQRLVSQDNFGFDLPAVEAATKKHEAIETDIAAYEERVQAVVAVARELEAENYHDIKRITARKDNVIRLWEYLLELLRARRQRLEMNLGLQKIFQEMLYIMDWMDEMKVLVLSQDYGKHLLGVEDLLQKHTLVEADIGIQAERVRGVNASAQKFATDGEGYKPCDPQVIRDRVAHMEFCYQELCQLAAERRARLEESRRLWKFFWEMAEEEGWIREKEKILSSDDYGKDLTSVMRLLSKHRAFEDEMSGRSGHFEQAIKEGEDMIAEEHFGSEKIRERIIYIREQWANLEQLSAIRKKRLEEASLLHQFQADADDIDAWMLDILKIVSSSDVGHDEYSTQSLVKKHKDVAEEIANYRPTLDTLHEQASALPQEHAESPDVRGRLSGIEERYKEVAELTRLRKQALQDTLALYKMFSEADACELWIDEKEQWLNNMQIPEKLEDLEVIQHRFESLEPEMNNQASRVAVVNQIARQLMHSGHPSEKEIKAQQDKLNTRWSQFRELVDRKKDALLSALSIQNYHLECNETKSWIREKTKVIESTQDLGNDLAGVMALQRKLTGMERDLVAIEAKLSDLQKEAEKLESEHPDQAQAILSRLAEISDVWEEMKTTLKNREASLGEASKLQQFLRDLDDFQSWLSRTQTAIASEDMPNTLTEAEKLLTQHENIKNEIDNYEEDYQKMRDMGEMVTQGQTDAQYMFLRQRLQALDTGWNELHKMWENRQNLLSQSHAYQQFLRDTKQAEAFLNNQEYVLAHTEMPTTLEGAEAAIKKQEDFMTTMDANEEKINAVVETGRRLVSDGNINSDRIQEKVDSIDDRHRKNRETASELLMRLKDNRDLQKFLQDCQELSLWINEKMLTAQDMSYDEARNLHSKWLKHQAFMAELASNKEWLDKIEKEGMQLISEKPETEAVVKEKLTGLHKMWEVLESTTQTKAQRLFDANKAELFTQSCADLDKWLHGLESQIQSDDYGKDLTSVNILLKKQQMLENQMEVRKKEIEELQSQAQALSQEGKSTDEVDSKRLTVQTKFMELLEPLNERKHNLLASKEIHQFNRDVEDEILWVGERMPLATSTDHGHNLQTVQLLIKKNQTLQKEIQGHQPRIDDIFERSQNIVTDSSSLSAEAIRQRLADLKQLWGLLIEETEKRHRRLEEAHRAQQYYFDAAEAEAWMSEQELYMMSEEKAKDEQSAVSMLKKHQILEQAVEDYAETVHQLSKTSRALVADSHPESERISMRQSKVDKLYAGLKDLAEERRGKLDERHRLFQLNREVDDLEQWIAEREVVAGSHELGQDYEHVTMLQERFREFARDTGNIGQERVDTVNHLADELINSGHSDAATIAEWKDGLNEAWADLLELIDTRTQILAASYELHKFYHDAKEIFGRIQDKHKKLPEELGRDQNTVETLQRMHTTFEHDIQALGTQVRQLQEDAARLQAAYAGDKADDIQKRENEVLEAWKSLLDACESRRVRLVDTGDKFRFFSMVRDLMLWMEDVIRQIEAQEKPRDVSSVELLMNNHQGIKAEIDARNDSFTTCIELGKSLLARKHYASEEIKEKLLQLTEKRKEMIDKWEDRWEWLRLILEVHQFSRDASVAEAWLLGQEPYLSSREIGQSVDEVEKLIKRHEAFEKSAATWDERFSALERLTTLELLEVRRQQEEEERKRRPPSPEPSTKVSEEAESQQQWDTSKGEQVSQNGLPAEQGSPRMAETVDTSEMVNGATEQRTSSKESSPIPSPTSDRKAKTALPAQSAATLPARTQETPSAQMEGFLNRKHEWEAHNKKASSRSWHNVYCVINNQEMGFYKDAKTAASGIPYHSEVPVSLKEAVCEVALDYKKKKHVFKLRLNDGNEYLFQAKDDEEMNTWIQAISSAISSDKHEVSASTQSTPASSRAQTLPTSVVTITSESSPGKREKDKEKDKEKRFSLFGKKK

SEQ ID NO: 54 - protein, 2155 aa, Homo sapiens
MELQRTSSISGPLSPAYTGQVPYNYNQLEGRFKQLQDEREAVQKKTFTKWVNSHLARVSCRITDLYTDLRDGRMLIKLLEVLSGERLPKPTKGRMRIHCLENVDKALQFLKEQRVHLENMGSHDIVDGNHRLTLGLIWTIILRFQIQDISVETEDNKEKKSAKDALLLWCQMKTAGYPNVNIHNFTTSWRDGMAFNALIHKHRPDLIDFDKLKKSNAHYNLQNAFNLAEQHLGLTKLLDPEDISVDHPDEKSIITYVVTYYHYFSKMKALAVEGKRIGKVLDNAIETEKMIEKYESLASDLLEWIEQTIIILNNRKFANSLVGVQQQLQAFNTYRTVEKPPKFTEKGNLEVLLFTIQSKMRANNQKVYMPREGKLISDINKAWERLEKAEHERELALRNELIRQEKLEQLARRFDRKAAMRETWLSENQRLVSQDNFGFDLPAVEAATKKHEAIETDIAAYEERVQAVVAVARELEAENYHDIKRITARKDNVIRLWEYLLELLRARRQRLEMNLGLQKIFQEMLYIMDWMDEMKVLVLSQDYGKHLLGVEDLLQKHTLVEADIGIQAERVRGVNASAQKFATDGEGYKPCDPQVIRDRVAHMEFCYQELCQLAAERRARLEESRRLWKFFWEMAEEEGWIREKEKILSSDDYGKDLTSVMRLLSKHRAFEDEMSGRSGHFEQAIKEGEDMIAEEHFGSEKIRERIIYIREQWANLEQLSAIRKKRLEEASLLHQFQADADDIDAWMLDILKIVSSSDVGHDEYSTQSLVKKHKDVAEEIANYRPTLDTLHEQASALPQEHAESPDVRGRLSGIEERYKEVAELTRLRKQALQDTLALYKMFSEADACELWIDEKEQWLNNMQIPEKLEDLEVIQHRFESLEPEMNNQASRVAVVNQIARQLMHSGHPSEKEIKAQQDKLNTRWSQFRELVDRKKDALLSALSIQNYHLECNETKSWIREKTKVIESTQDLGNDLAGVMALQRKLTGMERDLVAIEAKLSDLQKEAEKLESEHPDQAQAILSRLAEISDVWEEMKTTLKNREASLGEASKLQQFLRDLDDFQSWLSRTQTAIASEDMPNTLTEAEKLLTQHENIKNEIDNYEEDYQKMRDMGEMVTQGQTDAQYMFLRQRLQALDTGWNELHKMWENRQNLLSQSHAYQQFLRDTKQAEAFLNNQEYVLAHTEMPTTLEGAEAAIKKQEDFMTTMDANEEKINAVVETGRRLVSDGNINSDRIQEKVDSIDDRHRKNRETASELLMRLKDNRDLQKFLQDCQELSLWINEKMLTAQDMSYDEARNLHSKWLKHQAFMAELASNKEWLDKIEKEGMQLISEKPETEAVVKEKLTGLHKMWEVLESTTQTKAQRLFDANKAELFTQSCADLDKWLHGLESQIQSDDYGKDLTSVNILLKKQQMLENQMEVRKKEIEELQSQAQALSQEGKSTDEVDSKRLTVQTKFMELLEPLNERKHNLLASKEIHQFNRDVEDEILWVGERMPLATSTDHGHNLQTVQLLIKKNQTLQKEIQGHQPRIDDIFERSQNIVTDSSSLSAEAIRQRLADLKQLWGLLIEETEKRHRRLEEAHRAQQYYFDAAEAEAWMSEQELYMMSEEKAKDEQSAVSMLKKHQILEQAVEDYAETVHQLSKTSRALVADSHPESERISMRQSKVDKLYAGLKDLAEERRGKLDERHRLFQLNREVDDLEQWIAEREVVAGSHELGQDYEHVTMLQERFREFARDTGNIGQERVDTVNHLADELINSGHSDAATIAEWKDGLNEAWADLLELIDTRTQILAASYELHKFYHDAKEIFGRIQDKHKKLPEELGRDQNTVETLQRMHTTFEHDIQALGTQVRQLQEDAARLQAAYAGDKADDIQKRENEVLEAWKSLLDACESRRVRLVDTGDKFRFFSMVRDLMLWMEDVIRQIEAQEKPRDVSSVELLMNNHQGIKAEIDARNDSFTTCIELGKSLLARKHYASEEIKEKLLQLTEKRKEMIDKWEDRWEWLRLILEVHQFSRDASVAEAWLLGQEPYLSSREIGQSVDEVEKLIKRHEAFEKSAATWDERFSALERLTTLELLEVRRQQEEEERKRRPPSPEPSTKVSEEAESQQQWDTSKGEQVSQNGLPAEQGSPRVSYRSQTYQNYKNFNSRRTASDQPWSGL

SEQ ID NO: 55 - protein, 2390 aa, Homo sapiens
MSSTLSPTDFDSLEIQGQYSDINNRWDLPDSDWDNDSSSARLFERSRIKALADEREAVQKKTFTKWVNSHLARVTCRVGDLYSDLRDGRNLLRLLEVLSGEILPKPTKGRMRIHCLENVDKALQFLKEQKVHLENMGSHDIVDGNHRLTLGLVWTIILRFQIQDISVETEDNKEKKSAKDALLLWCQMKTAGYPNVNVHNFTTSWRDGLAFNAIVHKHRPDLLDFESLKKCNAHYNLQNAFNLAEKELGLTKLLDPEDVNVDQPDEKSIITYVATYYHYFSKMKALAVEGKRIGKVLDHAMEAERLVEKYESLASELLQWIEQTIVTLNDRQLANSLSGVQNQLQSFNSYRTVEKPPKFTEKGNLEVLLFTIQSKLRANNQKVYTPREGRLISDINKAWERLEKAEHERELALRTELIRQEKLEQLAARFDRKAAMRETWLSENQRLVSQDNFGLELAAVEAAVRKHEAIETDIVAYSGRVQAVDAVAAELAAERYHDIKRIAARQHNVARLWDFLRQMVAARRERLLLNLELQKVFQDLLYLMDWMEEMKGRLQSQDLGRHLAGVEDLLQLHELVEADIAVQAERVRAVSASALRFCNPGKEYRPCDPQLVSERVAKLEQSYEALCELAAARRARLEESRRLWRFLWEVGEAEAWVREQQHLLASADTGRDLTGALRLLNKHTALRGEMSGRLGPLKLTLEQGQQLVAEGHPGASQASARAAELQAQWERLEALAEERAQRLAQAASLYQFQADANDMEAWLVDALRLVSSPELGHDEFSTQALARQHRALEEEIRSHRPTLDALREQAAALPPTLSRTPEVQGRVPTLERHYEELQARAGERARALEAALALYTMLSEAGACGLWVEEKEQWLNGLALPERLEDLEVVQQRFETLEPEMNTLAAQITAVNDIAEQLLKANPPGKDRIVNTQEQLNHRWQQFRRLADGKKAALTSALSIQNYHLECTETQAWMREKTKVIESTQGLGNDLAGVLALQRKLAGTERDLEAIAARVGELTREANALAAGHPAQAVAINARLREVQTGWEDLRATMRRREESLGEARRLQDFLRSLDDFQAWLGRTQTAVASEEGPATLPEAEALLAQHAALRGEVERAQSEYSRLRALGEEVTRDQADPQCLFLRQRLEALGTGWEELGRMWESRQGRLAQAHGFQGFLRDARQAEGVLSSQEYVLSHTEMPGTLQAADAAIKKLEDFMSTMDANGERIHGLLEAGRQLVSEGNIHADKIREKADSIERRHKKNQDAAQQFLGRLRDNREQQHFLQDCHELKLWIDEKMLTAQDVSYDEARNLHTKWQKHQAFMAELAANKDWLDKVDKEGRELTLEKPELKALVSEKLRDLHRRWDELETTTQAKARSLFDANRAELFAQSCCALESWLESLQAQLHSDDYGKDLTSVNILLKKQQMLEWEMAVREKEVEAIQAQAKALAQEDQGAGEVERTSRAVEEKFRALCQPMRERCRRLQASREQHQFHRDVEDEILWVTERLPMASSMEHGKDLPSVQLLMKKNQTLQKEIQGHEPRIADLRERQRALGAAAAGPELAELQEMWKRLGHELELRGKRLEDALRAQQFYRDAAEAEAWMGEQELHMMGQEKAKDELSAQAEVKKHQVLEQALADYAQTIHQLAASSQDMIDHEHPESTRISIRQAQVDKLYAGLKELAGERRERLQEHLRLCQLRRELDDLEQWIQEREVVAASHELGQDYEHVTMLRDKFREFSRDTSTIGQERVDSANALANGLIAGGHAARATVAEWKDSLNEAWADLLELLDTRGQVLAAAYELQRFLHGARQALARVQHKQQQLPDGTGRDLNAAEALQRRHCAYEHDIQALSPQVQQVQDDGHRLQKAYAGDKAEEIGRHMQAVAEAWAQLQGSSAARRQLLLDTTDKFRFFKAVRELMLWMDEVNLQMDAQERPRDVSSADLVIKNQQGIKAEIEARADRFSSCIDMGKELLARSHYAAEEISEKLSQLQARRQETAEKWQEKMDWLQLVLEVLVFGRDAGMAEAWLCSQEPLVRSAELGCTVDEVESLIKRHEAFQKSAVAWEERFCALEKLTALEEREKERKRKREEEERRKQPPAPEPTASVPPGDLVGGQTASDTTWDGTQPRPPPSTQAPSVNGVCTDGEPSQPLLGQQRLEHSSFPEGPGPGSGDEANGPRGERQTRTRGPAPSAMPQSRSTESAHAATLPPRGPEPSAQEQMEGMLCRKQEMEAFGKKAANRSWQNVYCVLRRGSLGFYKDAKAASAGVPYHGEVPVSLARAQGSVAFDYRKRKHVFKLGLQDGKEYLFQAKDEAEMSSWLRVVNAAIATASSASGEPEEPVVPSTTRGMTRAMTMPPVSPVGAEGPVVLRSKDGREREREKRFSFFKKNK

SEQ ID NO: 56 - protein, 2415 aa, Mus musculus
METPKETAVESSGPKVLETAEEIQHRRAEVLNQYQRFKDRVAERGQKLEESYHYQVFRRDADDLEKWIMEKLEIAKDKTYEPTNIQGKYQKHESFVSEVQAKSRVLPELEEIREARFAEDHFAHEATKTHLKQLRLLWDLLLELTQEKSDVLLRALKFYQYSQECEDILEWVKEKEAIVTLVELGDDWERTEVLHKKFEEFQEELTARKGKVDRVNQYANECAQEKHPKLPEIKAKQDEVNAAWDRLWSLALKRRESLSNAADLQRFKRDVNEAIQWMEEKEPQLTSEDYGKDLVSSEALFHNHKRLERNLAVMDDKVKELCAKADKLMISHSADAPQIQQMKLDLVSNWERIRALATNRYAKLKASYGYHRFLSDYDELSGWMKEKTALINADELPTDVASGEALLARHQQHKHEIDSYDDRFQSADATGQELLDGNHEASEEIREKMTILANDWAALLELWDKCQHQYRQCLDFHLFYRDSEQVDSWMSRQEAFLENEDLGNSVGSVEALLQKHDDFEEAFTAQEEKIITLDETATKLIDNDHYDSENIAAIRDGLLARRDALRERAATRRKLLVDSQLLQQLYQDSDDLKTWINKKKKLADDDDYKDVQNLKSRVQKQQDFEEELAVNEIMLNNLEKTGQEMIEDGHYASEAVAARLSEVANLWKELLEATAQKGTQLYEANQLLQFENNAEDLKRWLEEVEWQVTSEDYGKGLADVQNLLRKHGLLESDVTARQNQVDTLTDMAAHFEEIGHPDSGDIRARQESLLSRFEALKEPLAIRKKKLIDLLKLQQICRDSEDEEAWIQETEPSAASTHLGKDLVAAKNLLNRHEVILADIASHEPRIQVITERGNKMVEEGHFAAEDIASRVESLNKNMESLHARAIRRENDLKANVQLQQYLADLHEAEAWIKEKEPIVDNKNYGADEEAAGALLKKHEAFLVDLNAFENSIKALRDQAEVCQQQQAAPVDEAGREARVIALYDFEARSRREVSMKKNDVLTLLSSINKDWWKVEADDHQGFVPAVYVRKLAPDELPGFPQHRQEEPVNIPQLQQQVETLYHSLLDRAEERRRRLLQRYNEFLLAYEAGDMLEWIQEKKTENTGVELDDVWELQKKFDEFQRDLKSNEPRLKDINKVADELLFEELLTPEGAHIRQELNTRWNSLKRLADEQYQLLSSAHAVEMFHREADDVKEQIDKKCRALNAADPGSDLLSVQALQRQHEVFERDIIPLGEKVTTLGETAERLCESHPDATEDLQKQRTELNEAWDTLQGLTSDRKESLNEAHKFFLFLSKASDLENWIKTIGGVISSPELAEDLTGTEILLERHQEHHDDIKREDPTFQALEDFGTELIDSGHRNRREIDNTLQNINSKRDNLEKSWENRKKMLDQCLELQLFRGKCDQVESWMVARENSLRSDDRDHLNSLQALMKKRDDLDKAITAQEGKISDLENVATRLIDNDHYAKEEIAARLQRVLDRWKALKEQLLTELGKLGDYADLKQFYRDLEDLEEWINEMLPIACDESYKDPTNIQRKYLKHQAFENEVNGRAEQVDGVINLGNSLIERRVCDGDEENMQEQLDKLKENWDYLLERTTDKGQKLNEASRQQRFNTSIRDFEFWLSEAEGLLAMKDQARDLTSAGNLLKKHQLLEAEMLAREDPLKDLNDLAQELISSGTFNIDQIEEKMNGVNERFENVQSLAAAHHEKLKETYALFQFFQDLDDEEAWIEEKLLRVSSQDYGRDLQSVQNLLKKHKRLEGELVAHEPAVQNVLDTAESLRDKAAVGKEEIQERLAQFVQHWEKLKELAKTRGVNLEESLEYLQFMENAEEEEAWLGEKCALVSRGDSGDTLAATQSLLKKHEALENDFAVHKNRVQDVCAQGEDILNKEETQNKDKISTKIQVLNEKTASLAKALAAWKSQLDDVHAFQQFNWKADVVESWIGEKEASLKTKSNGADLTAFLTLLAKHDTLDASLQSFQQERLSEIAELKDQLVAGEHSQAKAIEEQHAALLRHWEQLLEASRVHRQKLLEKQLPLQKAEELFMEFAHKASAFNNWCENAEEDLSEPVHCVSLNEIRQLQKEHEAFLASLAGAQEDFNYLLELDKQIKALNVPSSPYTWLTVDVLGRIWNHLPDIIKEREQELQKEEARQIKNFEMCQEFEQNASAFLQWIQETRAYFLDGSLLKETGTLESQLEANKRKQKEIQAMKRHLTKIEDLGDSMEEALILDIKYSTIGLAQQWDQLHQLGMRMQHNLEQQIQAKDTIGVSEETLKEFSTTYKHFDENLTGRLTHKEFRSCLRGLNYYLPMVEEGEPEPKFEKFLNAVDPGRKGYVSLEDYTSFLIDKESENIKTSDDIESAFQALAEGKAYITKEDMKQALTPEQVSFCTIHMQQYMDPRGRSQPAGYDYVGFTNSFFGN

SEQ ID NO: 57 - protein, 2478 aa, Mus musculus
MDPSGVKVLETAEDIQERRQQVLDRYHRFKELSTLRRQKLEDSYRFQFFQRDAEELEKWIQEKLQVASDENYKDPTNLQGKLQKHQAFEAEVQANSGAIVKLDETGNLMISEGHFASETIRTRLMELHRQWELLLEKMREKGIKLLQAQKLVQYLRECEDVMDWINDKEAIVTSEELGQDLEHVEVLQKKFEEFQTDLAAHEERVNEVSQFAAKLIQEQHPEEELIKTKQDEVNAAWQRLKGLALQRQGKLFGAAEVQRFNRDVDETIGWIKEKEQLMASDDFGRDLASVQALLRKHEGLERDLAALEDKVKALCAEADRLQQSHPLSASQIQVKREELITNWEQIRTLAAERHARLDDSYRLQRFLADFRDLTSWVTEMKALINADELANDVAGAEALLDRHQEHKGEIDAHEDSFKSADESGQALLAASHYASDEVREKLSILSEERTALLELWELRRQQYEQCMDLQLFYRDTEQVDNWMSKQEAFLLNEDLGDSLDSVEALLKKHEDFEKSLSAQEEKITALDEFATKLIQNNHYAMEDVATRRDALLSRRNALHERAMHRRAQLADSFHLQQFFRDSDELKSWVNEKMKTATDEAYKDPSNLQGKVQKHQAFEAELSANQSRIDALEKAGQKLIDVNHYAKEEVAARMNEVISLWKKLLEATELKGIKLREANQQQQFNRNVEDIELWLYEVEGHLASDDYGKDLTNVQNLQKKHALLEADVAAHQDRIDGITIQARQFQDAGHFDAENIKKKQEALVARYEALKEPMVARKQKLADSLRLQQLFRDVEDEETWIREKEPIAASTNRGKDLIGVQNLLKKHQALQAEIAGHEPRIKAVTQKGNAMVEEGHFAAEDVKAKLSELNQKWEALKAKASQRRQDLEDSLQAQQYFADANEAESWMREKEPIVGSTDYGKDEDSAEALLKKHEALMSDLSAYGSSIQALREQAQSCRQQVAPMDDETGKELVLALYDYQEKSPREVTMKKGDILTLLNSTNKDWWKVEVNDRQGFVPAAYVKKLDPAQSASRENLLEEQGSIALRQGQIDNQYQSLLELGEKRKGMLEKSCKKFMLFREANELQQWITEKEAALTNEEVGADLEQVEVLQKKFDDFQKDLKANESRLKDINKVAEDLESEGLMAEEVQAVQQQEVYGAMPRDEADSKTASPWKSARLMVHTVATFNSIKELNERWRSLQQLAEERSQLLGSAHEVQRFHRDADETKEWIEEKNQALNTDNYGHDLASVQALQRKHEGFERDLAALGDKVNSLGETAQRLIQSHPESAEDLKEKCTELNQAWTSLGKRADQRKAKLGDSHDLQRFLSDFRDLMSWINGIRGLVSSDELAKDVTGAEALLERHQEHRTEIDARAGTFQAFEQFGQQLLAHGHYASPEIKEKLDILDQERTDLEKAWVQRRMMLDHCLELQLFHRDCEQAENWMAAREAFLNTEDKGDSLDSVEALIKKHEDFDKAINVQEEKIAALQAFADQLIAVDHYAKGDIANRRNEVLDRWRRLKAQMIEKRSKLGESQTLQQFSRDVDEIEAWISEKLQTASDESYKDPTNIQLSKLLSKHQKHQAFEAELHANADRIRGVIDMGNSLIERGACAGSEDAVKARLAALADQWQFLVQKSAEKSQKLKEANKQQNFNTGIKDFDFWLSEVEALLASEDYGKDLASVNNLLKKHQLLEADISAHEDRLKDLNSQADSLMTSSAFDTSQVKEKRDTINGRFQKIKSMATSRRAKLSESHRLHQFFRDMDDEESWIKEKKLLVSSEDYGRDLTGVQNLRKKHKRLEAELAAHEPAIQGVLDTGKKLSDDNTIGQEEIQQRLAQFVEHWKELKQLAAARGQRLEESLEYQQFVANVEEEEAWINEKMTLVASEDYGDTLAAIQGLLKKHEAFETDFTVHKDRVNDVCTNGQDLIKKNNHHEENISSKMKGLNGKVSDLEKAAAQRKAKLDENSAFLQFNWKADVVESWIGEKENSLKTDDYGRDLSSVQTLLTKQETFDAGLQAFQQEGIANITALKDQLLAAKHIQSKAIEARHASLMKRWTQLLANSATRKKKLLEAQSHFRKVEDLFLTFAKKASAFNSWFENAEEDLTDPVRCNSLEEIKALREAHDAFRSSLSSAQADFNQLAELDRQIKSFRVASNPYTWFTMEALEETWRNLQKIIKERELELQKEQRRQEENDKLRQEFAQHANAFHQWIQETRTYLLDGIAYRRVIRVCQYEVGDDLSGRSCMVEESGTLESQLEATKRKHQEIRAMRSQLKKIEDLGAAMEEALILDNKYTEHSTVGLAQQWDQLDQLGMRMQHNLEQQIQARNTTGVTEEALKEFSMMFKHFDKDKSGRLNHQEFKSCLRSLGYDLPMVEEGEPDPEFEAILDTVDPNRDGHVSLQEYMAFMISRETENVKSSEEIESAFRALSSEGKPYVTKEELYQNLTREQADYCVSHMKPYVDGKGRELPTAFDYVEFTRSLFVN

SEQ ID NO: 58 - protein, 2329 aa, Mus musculus
MTSATEFENVGNQPPFSRINARWDAPDDELDNDNSSARLFERSRIKALADEREVVQKKTFTKWVNSHLARVSCRISDLYKDLRDGRMLIKLLEVLSGEMLPRPTKGKMRIHCLENVDKALQFLKEQRVHLENMGSHDIVDGNHRLVLGLIWTIILRFQIQDIVVQTQEGRETRSAKDALLLWCQMKTAGYPHVNVTNFTSSWKDGLAFNALIHKHRPDLIDFDKLKDSNARHNLEHAFDVAERQLGIIPLLDPEDVFTENPDEKSIITYVVAFYHYFSKMKVLAVEGKRVGKVIDHAIETEKMIEKYSGLASDLLTWIEQTISVLNSRKFANSLSGVQQQLQAFSTYRTVEKPPKFQEKGNLEVLLFTIQSRMRANNQKVYTPHDGKLVSDINRAWESLEEAEYQRELALRSELIRQEKLEQLARRFDRKAAMRETWLNENQRLVTQDNFGYDLAAVEAAKKKHEAIETDTAAYEERVKALEDLAQELEKENYHDQKRIIARKDNILRLWSYLQELLRSRRQRLEATLALQKLFQDMLHSIDWMDEIKAHILSAEFGKHLLEVEDLLQKHKLMEADIAIQGDKVKAITAATLQFAEGKGYQPCDPQVIQDRVSHLEQCFSELSNMAAGRKAQLEQSKRLWKFFWEMDEAESWIKEKEQIYSSLDYGKDLTSVLILQRKHKAFEDELRGLDAHLKQIFQEADDMVAQKQFGHPQIETRVKEVSAQWDHLKELAAFRKKDLQDAENFFQFQGDADDLKAWLQDAHRLLSGEDVGQDEGATRALGKKHKEFLEELEESRGVMEHLEHQAQGFPEEFRDSPDVTNRLQALRKLYQQVLTQAELRGHKLQEALDLYTVFGESDACELWMTEKGKWLDQMDIPNTLEDLEVVQHRFDILDQEMKTLMAQIDGVNLAANNLVESGHPRSGEVKQYQDRLNKRWQAFQAVVSEQREAVDSALRVNNYCVDCEETSKWIMDKTKVVESTKDLGQDLAGVIAIQRKLSGLERDVLAIRDRVSALERESQYLMESHPEQKEDIGQRQADVEKLWKGLQDALQGQELSLGEASKLQAFLQDLDDFKAWLSMAQKAVASEDMPESLPEAEQLLQQHAAIKEEIDAHRDDYHRVKASGEKVIEGQTDPDYQLLGQRLEGLDTDWDALRRMWESRGNTLTQCLGFQEFQKDAKQAEAILSNQEYTLAHLEPPDSLAAAEAGIRKFEDFLVSMENNRDKILSPVDSGNKLVAEGNLYSNKIMEKVQLIEDRHKKNNEKAQEATVLLKDNLELQNFLQNCKELTLWINDKLLTSPDVSYDEARNLHNKWMKHQAFMAELASHQGWLENIDAEGRQLMAEKPQFKDVVSERLEALHKLWEELQSTAKAKAEQLSAARSSDLRLQTHADLNKWIGAMEDQLRSDDLGKDLTTVNRMLAKLKRVEEQVNLRKEELEELFADAPSLGAEAGDTDMSIEKRFLDLLEPLGRRKKQLELSKAKLQISRDLEDETLWVEERLPLAQSADYGTNLQTVQLFMKKNQTLQNEILGHAPRVEDVLRRGQELVKAAEIDCQDIEERLGHLQSSWDTLREAAAGRLQRLRDAHEAQQYYLDAGEAEAWISEQELYVFSDEPPKDEEGAIVMLKRHLRQQRTVEEYGRNIKQLAGRAQSLLSAGHPEGEQIIRLQGQVDKQYAGLKDMAEERRRRLENMYHLFQLKREADDLEQWITEKEMVASSQEMGQDFDHVTMLRDKFRDFARETGAIGQERVDNVNTIIERLIDAGHSEAATIAEWKDGLNDMWADLLELIDTRMQLLAASYDLHRYFYTGTEILGLIDEKHRELPEDVGLDASTAESFHRVHTAFERELHLLGVQVQQFQDVATRLQTAYAGEKADAIQSKEQEVSAAWQALLDACAGRRAQLVDTADKFRFFSMVRDLLSWMESIIRQIETQERPRDVSSVELLLKYHQGIKAEINTRAKNFSTCLELGESLLQRQHQASDEIREKLQQVISRRQEMNDKWEARSDRLHMLLEVCQFSRDASVAEAWLIAQEPYLASRDFGHTVDSVEKLIKRHEAFEKSTASWAERFAALEKPTTLELKERQTPERPTEEPGPQEEEGETAGEAPQVHHAATERTSPGEERGPWPQDLQPPPLPGHHKDEQEKSVGDERPATEPLFKVLDTPLSEGDEPTTLPAQRDLGHTVQMEGYLGRKHDLEGPNKKASNRSWNNLYCVLRNSQLTFYKDAKNLALGVPYHGEEPLALRHAICEIAVNYKKKKHVFKLRLSNGSEWLFHGKDEEEMLMWLQSMSTAINESQSIRVKAQSLPLPSLAGPDASVGKKEKEKRFSFFPKKK

SEQ ID NO: 59 - protein, 2363 aa, Mus musculus
MTTTVATDYDNIEIQQQYSDVNNRWDVDDWDNENSSARLFERSRIKALADEREAVQKKTFTKWVNSHLARVSCRITDLYTDLRDGRMLIKLLEVLSGERLPKPTKGRMRIHCLENVDKALQFLKEQRVHLENMGSHDIVDGNHRLTLGLIWTIILRFQIQDISVETEDNKEKKSAKDALLLWCQMKTAGYPNVNIHNFTTSWRDGMAFNALIHKHRPDLIDFDKLKKSNAHYNLQNAFNLAEQHLGLTKLLDPEDISVDHPDEKSIITYVVTYYHYFSKMKALAVEGKRIGKVLDNAIETEKMIEKYESLASDLLEWIEQTIIILNNRKFANSLVGVQQQLQAFNTYRTVEKPPKFTEKGNLEVLLFTIQSKMRANNQKVYMPREGKLISDINKAWERLEKAEHERELALRNELIRQEKLEQLARRFDRKAAMRETWLSENQRLVSQDNFGFDLPAVEAATKKHEAIETDIAAYEERVQAVVAVARELEAENYHDIKRITARKDNVIRLWEYLLELLRARRQRLEMNLGLQKIFQEMLYIMDWMDEMKVLLLSQDYGKHLLGVEDLLQKHALVEADIAIQAERVRGVNASAQKFATDGEGYKPCDPQVIRDRVAHMEFCYQELCQLAAERRARLEESRRLWKFFWEMAEEEGWIREKEKILSSDDYGKDLTSVMRLLSKHRAFEDEMSGRSGHFEQAIKEGEDMIAEEHFGSEKIRERIIYIREQWANLEQLSAIRKKRLEEASLLHQFQADADDIDAWMLDILKIVSSNDVGHDEYSTQSLVKKHKDVAEEITNYRPTIDTLHEQASALPQAHAESPDVKGRLAGIEERCKEMAELTRLRKQALQDTLALYKMFSEADACELWIDEKEQWLNNMQIPEKLEDLEVIQHRFESLEPEMNNQASRVAVVNQIARQLMHNGHPSEKEIRAQQDKLNTRWSQFRELVDRKKDALLSALSIQNYHLECNETKSWIREKTKVIESTQDLGNDLAGVMALQRKLTGMERDLVAIEAKLSDLQKEAEKLESEHPDQAQAILSRLAEISDVWEEMKTTLKNREASLGEASKLQQFLRDLDDFQSWLSRTQTAIASEDMPNTLTEAEKLLTQHENIKNEIDNYEEDYQKMRDMGEMVTQGQTDAQYMFLRQRLQALDTGWNELHKMWENRQNLLSQSHAYQQFLRDTKQAEAFLNNQEYVLAHTEMPTTLEGAEAAIKKQEDFMTTMDANEEKINAVVETGRRLVSDGNINSDRIQEKVDSIDDRHRKNREAASELLMRLKDNRDLQKFLQDCQELSLWINEKMLTAQDMSYDEARNLHSKWLKHQAFMAELASNKEWLDKIEKEGMQLISEKPETEAVVKEKLTGLHKMWEVLESTTQTKAQRLFDANKAELFTQSCADLDKWLHGLESQIQSDDYGKDLTSVNILLKKQQMLENQMEVRKKEIEELQSQAQALSQEGKSTDEVDSKRLTVQTKFMELLEPLSERKHNLLASKEIHQFNRDVEDEILWVGERMPLATSTDHGHNLQTVQLLIKKNQTLQKEIQGHQPRIDDIFERSQNIITDSSSLNAEAIRQRLADLKQLWGLLIEETEKRHRRLEEAHKAQQYYFDAAEAEAWMSEQELYMMSEEKAKDEQSAVSMLKKHQILEQAVEDYAETVHQLSKTSRALVADSHPESERISMRQSKVDKLYAGLKDLAEERRGKLDERHRLFQLNREVDDLEQWIAEREVVAGSHELGQDYEHVTMLQERFREFARDTGNIGQERVDTVNNMADELINSGHSDAATIAEWKDGLNEAWADLLELIDTRTQILAASYELHKFYHDAKEIFGRIQDKHKKLPEELGRDQNTVETLQRMHTTFEHDIQALGTQVRQLQEDAARLQAAYAGDKADDIQKRENEVLEAWKSLLDACEGRRVRLVDTGDKFRFFSMVRDLMLWMEDVIRQIEAQEKPRDVSSVELLMNNHQGIKAEIDARNDSFTACIELGKSLLARKHYASEEIKEKLLQLTEKRKEMIDKWEDRWEWLRLILEVHQFSRDASVAEAWLLGQEPYLSSREIGQSVDEVEKLIKRHEAFEKSAATWDERFSALERLTTLELLEVRRQQEEEERKRRPPSPDPNTKVSEEAESQQWDTSKGDQVSQNGLPAEQGSPRMAGTMETSEMVNGAAEQRTSSKESSPVPSPTLDRKAKSALPAQSAATLPARTLETPAAQMEGFLNRKHEWEAHNKKASSRSWHNVYCVINNQEMGFYKDAKSAASGIPYHSEVPVSLKEAICEVALDYKKKKHVFKLRLSDGNEYLFQAKDDEEMNTWIQAISSAISSDKHDTSASTQSTPASSRAQTLPTSVVTITSESSPGKREKDKEKDKEKRFSLFGKKK

SEQ ID NO: 60 - protein, 2154 aa, Mus musculus
MELQRTSSISGPLSPAYTGQVPYNYNQLEGRFKQLQDEREAVQKKTFTKWVNSHLARVSCRITDLYTDLRDGRMLIKLLEVLSGERLPKPTKGRMRIHCLENVDKALQFLKEQRVHLENMGSHDIVDGNHRLTLGLIWTIILRFQIQDISVETEDNKEKKSAKDALLLWCQMKTAGYPNVNIHNFTTSWRDGMAFNALIHKHRPDLIDFDKLKKSNAHYNLQNAFNLAEQHLGLTKLLDPEDISVDHPDEKSIITYVVTYYHYFSKMKALAVEGKRIGKVLDNAIETEKMIEKYESLASDLLEWIEQTIIILNNRKFANSLVGVQQQLQAFNTYRTVEKPPKFTEKGNLEVLLFTIQSKMRANNQKVYMPREGKLISDINKAWERLEKAEHERELALRNELIRQEKLEQLARRFDRKAAMRETWLSENQRLVSQDNFGFDLPAVEAATKKHEAIETDIAAYEERVQAVVAVARELEAENYHDIKRITARKDNVIRLWEYLLELLRARRQRLEMNLGLQKIFQEMLYIMDWMDEMKVLLLSQDYGKHLLGVEDLLQKHALVEADIAIQAERVRGVNASAQKFATDGEGYKPCDPQVIRDRVAHMEFCYQELCQLAAERRARLEESRRLWKFFWEMAEEEGWIREKEKILSSDDYGKDLTSVMRLLSKHRAFEDEMSGRSGHFEQAIKEGEDMIAEEHFGSEKIRERIIYIREQWANLEQLSAIRKKRLEEASLLHQFQADADDIDAWMLDILKIVSSNDVGHDEYSTQSLVKKHKDVAEEITNYRPTIDTLHEQASALPQAHAESPDVKGRLAGIEERCKEMAELTRLRKQALQDTLALYKMFSEADACELWIDEKEQWLNNMQIPEKLEDLEVIQHRFESLEPEMNNQASRVAVVNQIARQLMHNGHPSEKEIRAQQDKLNTRWSQFRELVDRKKDALLSALSIQNYHLECNETKSWIREKTKVIESTQDLGNDLAGVMALQRKLTGMERDLVAIEAKLSDLQKEAEKLESEHPDQAQAILSRLAEISDVWEEMKTTLKNREASLGEASKLQQFLRDLDDFQSWLSRTQTAIASEDMPNTLTEAEKLLTQHENIKNEIDNYEEDYQKMRDMGEMVTQGQTDAQYMFLRQRLQALDTGWNELHKMWENRQNLLSQSHAYQQFLRDTKQAEAFLNNQEYVLAHTEMPTTLEGAEAAIKKQEDFMTTMDANEEKINAVVETGRRLVSDGNINSDRIQEKVDSIDDRHRKNREAASELLMRLKDNRDLQKFLQDCQELSLWINEKMLTAQDMSYDEARNLHSKWLKHQAFMAELASNKEWLDKIEKEGMQLISEKPETEAVVKEKLTGLHKMWEVLESTTQTKAQRLFDANKAELFTQSCADLDKWLHGLESQIQSDDYGKDLTSVNILLKKQQMLENQMEVRKKEIEELQSQAQALSQEGKSTDEVDSKRLTVQTKFMELLEPLSERKHNLLASKEIHQFNRDVEDEILWVGERMPLATSTDHGHNLQTVQLLIKKNQTLQKEIQGHQPRIDDIFERSQNIITDSSSLNAEAIRQRLADLKQLWGLLIEETEKRHRRLEEAHKAQQYYFDAAEAEAWMSEQELYMMSEEKAKDEQSAVSMLKKHQILEQAVEDYAETVHQLSKTSRALVADSHPESERISMRQSKVDKLYAGLKDLAEERRGKLDERHRLFQLNREVDDLEQWIAEREVVAGSHELGQDYEHVTMLQERFREFARDTGNIGQERVDTVNNMADELINSGHSDAATIAEWKDGLNEAWADLLELIDTRTQILAASYELHKFYHDAKEIFGRIQDKHKKLPEELGRDQNTVETLQRMHTTFEHDIQALGTQVRQLQEDAARLQAAYAGDKADDIQKRENEVLEAWKSLLDACEGRRVRLVDTGDKFRFFSMVRDLMLWMEDVIRQIEAQEKPRDVSSVELLMNNHQGIKAEIDARNDSFTACIELGKSLLARKHYASEEIKEKLLQLTEKRKEMIDKWEDRWEWLRLILEVHQFSRDASVAEAWLLGQEPYLSSREIGQSVDEVEKLIKRHEAFEKSAATWDERFSALERLTTLELLEVRRQQEEEERKRRPPSPDPNTKVSEEAESQQWDTSKGDQVSQNGLPAEQGSPRVSYRSQTYQNYKNFNSRRTASDHSWSGM

SEQ ID NO: 61 - protein, 2388 aa, Mus musculus
MSSTLSPTDFDSLEIQGQYSDINNRWDLPDSDWDNDSSSARLFERSRIKALADEREAVQKKTFTKWVNSHLARVTCRVGDLYSDLRDGRNLLRLLEVLSGETLPKPTKGRMRIHCLENVDKALQFLKEQKVHLENMGSHDIVDGNHRLTLGLVWTIILRFQIQDISVETEDNKEKKSAKDALLLWCQMKTAGYPNVNVHNFTTSWRDGLAFNAIVHKHRPDLLDFESLKKCNAHYNLQNAFNLAEKELGLTKLLDPEDVNVDQPDEKSIITYVATYYHYFSKMKALAVEGKRIGKVLDHAMEAEHLVEKYESLASELLQWIEQTIVTLNDRQLANSLSGVQNQLQSFNSYRTVEKPPKFTEKGNLEVLLFTIQSKLRANNQKVYTPREGRLISDINKAWERLEKAEHERELALRTELIRQEKLEQLAARFDRKAAMRETWLSENQRLVSQDNFGLELAAVEAAVRKHEAIETDIVAYSGRVQAVDAVAAELAAEHYHDIKRIAARQNNVARLWDFLRQMVAARRERLLLNLELQKVFQDLLYLMDWMAEMKGRLQSQDLGKHLAGVEDLLQLHELVEADIAVQAERVRAVSASALRFCDPGKEYRPCDPQLVSERVATLEQSYEALCELAATRRARLEESRRLWRFLWEVGEAEAWVREQQHLLASADTGRDLTGVLRLLNKHAALRGEMSGRLGPLKLTLEQGQQLVAEGHPGANQASTRAAELQAQWERLEALAEERAQQLAQAASLYQFQADANDMEAWLVDALRLVSSPEVGHDEFSTQALARQHRALEEEIRAHRPTLDALREQAAALPPALSHTPEVQGRVPTLEQHYEELQARAGERARALEAALAFYTMLSEAGACGLWVEEKEQWLNGLALPERLEDLEVVQQRFETLEPEMNALAARVTAVNDIAEQLLKASPPGKDRIIGTQEQLNQRWQQFRSLADGKKAALTSALSIQNYHLECTETQAWMREKTKVIESTQGLGNDLAGVLALQRKLAGTERDLEAISARVGELTQEANALAAGHPAQAPAINTRLGEVQAGWEDLRATMRRREESLGEARRLQDFLRSLDDFQAWLGRTQTAVASEEGPATLPEAEALLAQHAALRGEVERAQSEYSRLRTLGEEVTRDQADPQCLFLRQRLEALGTGWEELGRMWESRQGRLAQAHGFQGFLRDARQAEGVLSSQEYVLSHTEMPGTLQAADAAIKKLEDFMSTMDANGERIRGLLEAGRQLVSKGNIHAEKIQEKADSIEKRHRKNQEAVQQLLGRLRDNREQQHFLQDCQELRLWIDEKMLTAQDVSYDEARNLHTKWQKHQAFMAELAANKDWLDKVDKEGRELTLEKPELKVVVSEKLEDLHRRWDELETTTQAKARSLFDANRAELFAQSCSALESWLESLQAQLHSDDYGKDLTSVNILLKKQQMLEREMAVREKEVEAIQAQAQALAQEDQSAGEVERTSRAVEEKFRALCQPMKERCRRLHASREQHQFHRDVEDEILWVTERLPMASSLEHGKDLPSVQLLMKKNQTLQKEIQGHEPRIADLKERQRTLGTAAAGPELAELQEMWKRLSHELELRGKRLEEALRAQQFYRDAAEAEAWMGEQELHMMGQEKAKDELSAQAEVKKHQVLEQALADYAQTIKQLAASSQDMIDHEHPESTRLTIRQAQVDKLYASLKELAGERRERLQEHLRLCQLRRELDDLEQWIQEREVVAASHELGQDYEHVTMLRDKFREFSKDTSTIGQERVDSANALANGLIAGGHAARATVAEWKDSLNEAWADLLELLDTRGQVLAAAYELQRFLHGARQALARVQHKQQQLPDGTGRDLNAAEALQRRHCAYEHDIQALSTQVQQVQDDGQRLQKAYAGDKAEEIGRHMQAVAEAWAQLQGSSAARRQLLLDTTDKFRFFKAVRELMLWMDGINLQMDAQERPRDVSSADLVIKNQQGIKAEIEARADRFSSCIDMGQELLARSHYAAEEISEKLSQLQSRRQETADKWQEKMDWLQLVLEVLVFGRDAGMAEAWLCSQEPLVRSAELGCTVDEVESLIKRHEAFQKSAVAWEERFSALEKLTALEERENERKRKREEEERRKQPPTSEPMASQPEGSLVDGQRVPDTAWDGTQSKLPPSTQAPSVNGVCTDTDSSQPLLEQQRLEQSNVPEGPGSGTGDESSGPRGERQTLPRGPAPSPMPQSRSSEAAHGATLPTRGPELSAQEQMEGMLCRKQEMEAFNKKAANRSWQNVYCVLRRGSLGFYKDARAASAGVPYHGEVPVSLARAQGSVAFDYRKRKHVFKLGLQDGKEYLFQAKDEAEMSSWLRVVNAAIATASSAPGESEEPVVPSASRGLTRAMTMPPVSQPEGSIVLRSKDGREREREKRFSFFKKNK

SEQ ID NO: 62 - protein, 2561 aa, Mus musculus
MAQVPGEVDNMEGPAVSNNNNPSARWESPDRGWDREPPAAANAAASLFECSRIKALADEREAVQKKTFTKWVNSHLARVGCHIGDLYADLRDGFVLTRLLEVLSGEQLPRPTRGRMRIHSLENVDKALQFLKEQRVHLENVGSHDIVDGNHRLTLGLVWTIILRFQIQVIKIETEDNRETRSAKDALLLWCQMKTAGYPEVNIQNFTTSWRDGLAFNALIHRHRPDLVDLSKLTKSNANYNLQRAFRTAEQHLGLARLLDPEDVNMEAPDEKSIITYVVSFYHYFSKMKALAVEGKRIGKVLDQVLEVDKIIERYEELAAELLAWIHRTVDLISNQKFANSLSGVQQQLQAFTAYCTLEKPVKFQEKGNLEVLLFSIQSKLRAHNRRLFVPREGCGIWDIDKAWGELEKAEHEREAALRAELIRQEKLELLAQRFDHKVAMRESWLNENQRLVSQDNFGYELPAVEAAMKKHEAIEADIAAYEERVQGVAELAQALAAEGYYDARRVAAQRDSVLRQWALLTGLVGARRTRLEQNLALQKVFQEMVYMVDWMEEMQTQLLSRECGQHLVEADDLLQKHGLLEGDIAAQSERVEALNAAALRFSQLQGYQPCDPQVICNRVNHVHGCLSELQEQAARRRAELEASRSLWALLQELEEAESWARDKERLLEATSGSGGAAGTAGGAHDLSSTARLLAQHKILQGELGGRRALLQQALRRGEELAAAGGSVGPGAEPLHLAGLAERAASARRRWQRLEEAAARRERRLQEARALHQFGADLDGLLDWLRDAYRLAAAGDFGHDEASSRRLARQHRALTGEVEAHRGPVGGLRRQLATLGGASGAGPLVVALQVRVVEAEQLFAEVTEVAALRRQWLRDALAVYRMFGEVHACELWIGEKEQWLLAMRVPDSLDDVEVVQHRFESLDQEMNSLMGRVLDVNQTVQELVEGGHPSSDEVRSCQDHLNSRWNRIVELVEQRKEEMSAVLLVENHVLEVAEVRAQVREKRRAVESAPRAGGALQWRLSGLEAALQALEPRQAALLEEAALLAERFPAQATRLHQGAEELGAEWGALAGAAQACGEAVAAAGRLQRFLRDLDTFLDWLVRAQEAAGAVEGPLPRSLEEADGLLARHAALKEEVDQREEDYARIVAASEALLASEGAELGPGLALDEWLPHLEVGWHKLLGLWEERREALVQAHVYQLFLRDLCQALAVLRNQEVALSGAELPCTVESVEEAMKRHRDFLTTMELNQQKMQVAVQAAESLLRQGNAYGEQAQEAVARLLEKSQENQLRAQQWMQKLLDQLVLQHFLRDCHELDGWIHEKMLMARDGTREDSHKLHKRWLRHQAFMAELAQNKEWLEKIEREGQQLMQEKPELAASVRKKLGEIRQCWAELESTTQAKARQLFEASKADQLVQSFAELDKRLLHMESQLQDVDPGGDLATVNSQLKKLQSMESQVEEWCREVGELQAQTAALPLEQASKELVGERQSAVGERLVRLLEPLQERRRLLLASKELHQVAHDLDDELAWVQERLPLAMQTERGTGLQAVQQHIKKNQGLRREIQAHGPRLEEVLERAGVLASLRSPEAEAVRRGQEQLQSAWTGLREAAERRQQTLDAAFQVEQYYFDVAEVEAWLGEQELLMMSEDKGKDEQSTLQLLKKHLQLEQGVENYEESIAQLSRQCRALLEMGHPDSEQISRRQSQVDRLYVALKELGEERRVSLEQQYWLYQLSRQVDELEHWIAEKEVVAGSPELGQDFEHVSVLQEKFSEFASETGTAGRERLAAVNQMVDELIECGHTAAATMAEWKDGLNEAWAELLELMGTRAQLLAASRELHKFFSDARELQGQIEEKRRRLPRLTAPPEPRPSASSMQRTLRAFEHDLQLLVSQVRQLQEGAAQLRTVYAGEHAEAIASREQEVLQGWKELLAACEDARLHVSSTADALRFHSQARDLLSWMDGIAGQIGAADKPRDVSSVEVLMNYHQGLKTELEARVPELATCQELGRSLLLNKSAMADEIQAQLDKLGSRKEEVSEKWDRHWEWLQQMLEVHQFAQEAVVADAWLTAQEPLLQSRELGSSVDEVEQLIRRHEAFRKAAAAWEERFSSLRRLTTIEKLKAEQSKQPPTPLLGRKFFGDPTELAAKAAPLLRPGGYDRGLEPLARRASDTLSAEVRTRVGYVRQELKPERLQPRIDRLPETSGKVEPAAPTAAALDTTDTPGTPAATELVRPRSERQELADRAEELPRRRRSERQESVDQPEETARRRRPERQESADHEGPHSLTLGRYEQMERRRERRERRIERQESSEQETPTRGELVKGKATLADIVEQLQEKEAGPGIPAGVPSLPQPRELPPGRLPNGLEPPERTPRPDRPRARDRPKPRRRPRPREGGEGGGSRRSRSAPAQGGSAPAPPPPPTHTVQHEGFLLRKRELDANRKSSNRSWVSLYCVLSKGELGFYKDSKGPASGGTHGGEPLLSLHKATSEVASDYKKKKHVFKLQTQDGSEFLLQAKDEEEMNGWLEAVANSVAEHAEIARWGQTLPTTSSTDEGNPKREGGERRASGRRK

SEQ ID NO: 63 - protein, 3681 aa, Mus musculus
  misc_feature 2344: Xaa = any naturally occurring amino acid
MGTVYQDRASDSWQKDHQFPQYFPAPMPPPPPDTGKCPVAIHPQRAKAHKLVVPSTLHLLSRSVPDEKTQAQSSALLSSSLAMDSEYEIGHVRKLQAQHTHMQEKTFTNWINNIFRLGRVGIRIQNLYTEFADGAHLLRLLELISGEALPAPSPGRLRVHFLENNSHALAFLRAKVPIPFIGPENIVDGDQSLILGLLWVIILRFQISHISLDREEFGASAALLSAKEALLVWCQRKTAGYTNVDITDFSRSWSDGLGFNALLHAHRPDLLDYGSLSPDRPLYNLSFAFRVAEQQLGIAQLLDPEDVAALHPDECSIMTYLSQYYHYFSRLQRGHTAQRRLAKILLQLQETEVLQAQYKQLVADLLCWIEEKKMQLEARDFPDSLPAMRQLLAAFASFRAREKPPRWQQRGATEALLFQLQTTLRAQNRRPFLPREGLGPAELAQRWAELERAEACRSQAMQQRLLQLERLDTLARRFQCKASHRESFLNDVEQMLDQARASLTDPATVEAATQRLSVLEAAILPQEGRFQALGEMADILRQEEYHSWADMARRQKEITGRWRRLLRCLQEERKRMEDSKAVLSLLQGVEAVTHQLGELQVLASSTVYGQQLAEIVSLLQSHDLLEAQVSAHRTHVTHLVHQTTQLDSQGTSVEVLQAKALALAELHHSLVSLVRARRTLLEQTLQRAQFLRSCEEEEAWLQEHRQLMETAVLDRDLTQIATALQKHKALETELHRHQAVCVDLMQRGRNFSVREPLTQPDPLERAEAVQGTWQLLWAGAARRRARLQTALLIGQYFSDSAEAASWLFQRQKQLESASCGKDQADAEALLLQHLRLEQDVRAFAAELRELEEQARAAAALVSHMSISATRSSPNESLDGPGCWLVSSVLPTPSITLDSVLPAENDVHFNSSTILQAQADVSQTYEKLRALAKLHRTRLEESIALFSFYSSCRELQSWLEKQTALFQTLQPQGHNLEVIQLKYENVLMTLATGKGHWAEAINTAEQLKQRCPGHISKIQQQQEDLKQRWQQLEALKEEKLLQLTRGMEVCSLLQESEPIQAQLLNVISRLETLGTRSSGDSHHTLQQTQQKVLVLEKKISYLQRATIEVMESGSPESRLLWEQVLMLQSLLKQAQGQVARQIQVQTVARVQRGILQESQKLLLWAEDIQAQLCSKEERQVEASALRPLRRHGTLQEETCLWEERLQQLEAQGQPVAVSDSPQSQEVASALRLLGQHSQQLKALWEQRQQKFWEGLELQGFGQEVDDFMATCASHEALLQLDNLGEDIREAQSLLQQHQGLGWLRSTLGSRAEALRARGEKLLLSHPAAVSKIRELLHSAQAQWTRVQERSEQRRVQLLASLQLQEWKQAEEGLMLWMEEKWPRVADERSQAGSNILQKLKWRKITKSELLASRRYMEELQQAGKELLHSNPYAQEDIQDRLQSLNHKWEELNHKMEDRGDRLPQTRQQDQLLELIQDVQETMEHLEGALQSTETGQDLCSSRRLQRQHCKLEDKSQALASKMDALISQTHNAFTSWTILEESQKCHQRFKSLQSKLATQHQQLQASVELYEFNLLSNLELTWAAEHMPNAALNCPAQCWHDAHSLQRKHKMLQAEVKGHVRHMYRVLSSGQRLAASGHPRAQHIVEQCQKLESHWAGLEQACEERAHCLQQAVTVQQYFLNVSEMETWVEEKRPLASSQDYGSNEEATSGLIRKHQMLQQEVALYWSSMEDLEQRFQTLAEFEAPERLGVVREKLQALRKLADERGQELEGTLRLHEFMREAEDLQSWLSSRKQVARGGDTFGEDHEHVLQLCTEFTKFQYQVETGAQRVETCRLLAESLQERGHSAAPKAHQRQQDIQASWSELCQLTQARSRLLNDAEITLRVHGDLLEVLTQIQEKATSLPNDVAQDLCGVENQLQRHERLERELAGMEQQVQELMKAGGRVQELCPGTQALAAVQQKQQAVTQAWEALQLRMEQRKAQLERGYLLVRFHTAVRDYTSWAASVHQELQMEEASWEPHSLLLRLRAHQWLWAELKAKEELQQRATKMGQQALLAAGTPAKVQDGLRTLQEERDQVFQAWALKQEKLQAMLQEQHLLRQCGHLVEVLTAQEAFLKASGLGSSVEEVEQLIRKHVIFQKVLALQDKKESALNEQLKTISSPKGQNLFCHMLEHRAQVKELAESRGQALHTSLMIGNFVRAATQAEDWIQQRVQQLRAWSPLGNLKDYLKHLRKHQAFRAEVQAQEQILTSVAKQGEELLSQSHPQAGEVSQRLEALRDLWEKLRQAVTLQGQALENRYNFQEFLQRVDLAETWIQEKERMVNSCDIGLNLEHCLQLCRQVRRLQXGSARVTVDDAHIKGIKNLSLQLKNQGPEESETICQRQNQLNNRWKTFHGNLLLYQQRLEAALEIHRLSRELDDVIERLREKESLIWAPEGTEDLENVQRLSWRQKVLQQEMGLIQTQVESLEGRIGRLCKESPEVAHSLRHKQQEMMDSWWKVWSKAQNRRELLDVGHEVQKLQTLLQDLQDWARGLQAEMATQGTPCSPVRIQYMLEEYRAYKVELDIRTESLNLVQSMGQRLLASGYPQASEIHQTLAAVEQGLSSLRESWQGRQQQLQQALEQQLFLGSVEKAERWLDSEEASLASEGVADPLVTVETLLSKLKRHEQGLKAQAEKIRALEATAHSLHQGGHSEARSILDRCQALLLRTEALTEQARARGHQLEELRKLRTFLQDSNEVTAWLREKSLAALDEGQQDPATMQTQLQKQQNFQAELDASVHQQQEVQMEGQKLLQGGHPASETIRGQLEELGGLWDELQTNCQRKMARLQGALKVLHLQRMLKELEKWLEHMEAELRVPVRSQALPRVGELLGAQEELEAAMDRQAKEVQELQGQSQACLQEGHCLAKDVEEQARQLLQRFQSLREPLQERRASLEAQRLLLQFFRDADEEMAWVQEKLPSATAQDYGQSLNTVRHLQEKHQNLENEIHSHKALSQVVTGTGHKLIQAGHFATEEVAARVQQLEVALNRLETEAAQRRRRLQQALEAQQTLVELLEAGSWLAERDHILDSEDLGQDAEATQALLRCLEATTRDLEGFSSRIEQLQQTVALLESGQTPGSPRVLAQLQAVREAHARLLQRAESRGEALREQLHLYQLEQEALLLDAWLTTKLAVAESQDYGQDLAGIKVLEDMFGAFNREVQSLGQAKMQTLRERMASLERGAPRFYPQIQAQKCRVQAAWEGLNKAIKVRTENLAAACDLRSFEQAASELQRWIQEKTTLLEEAFQQQQQQQQQQHRRLQRELRAIEKEVSRVQMEAHRLGQHYPVAQGSLSEWLTKVQGAWTNLEAKVQEWSQKLLQATQGHTFLGSCRELLAWAQEMQELLSKEKQAGDVVGAKQFLEQHEALEQEIQERCLQAQTIRHEGQQLLDNGHFLSPEVAECMQELERHLQELQVAWALRGQRWEQTRSLQQLRQRLELAEAWLASWERLLLDPSCGHSVLEVERLLYRHEGLEKLLVAHEETFIQLQTMTEEAKGGHVTEASVEQQPPTEGRQPRTSFPTSSHGILARGASSPFSDMRKAEVPSGTGELAYVSPLVPEETEFLFAVLSEKQAASWQPALGSMAGLNLKMNPQSTPILGATSGDTPGNHSTTDPKVPSPGLLRTSVQNTAPVRGQATDVASHWLCLR

SEQ ID NO: 64 - protein, 2428 aa, Pan troglodytes
MEQFPKETVVESSGPKVLETAEEIQERRQEVLTRYQSFKERVAERGQKLEDSYHLQVFKRDADDLGKWIMEKVNILTDKSYEDPTNIQGKYQKHQSLEAEVQTKSRLMSELEKTREERFTMGHSAHEETKAHIEELRRLWDLLLELTLEKGALLLRALKFQQYVQECADILEWIGDKEAIATSVELGEDWERTEVLHKKFEDFQVELVAKEGRVVEVNQYANECAEENHPDLPLIQSKQNEVNAAWERLRGLALQRQKALSNAADLQRFKRDVTEAIQWIKEKEPVLTSEDYGKDLVASEGLFHSHKGLERNLAVMSDKVKELCAKAEKLTLSHPSDAPQIQEMKEDLVANWEHIRALATSRYEKLQATYWYHRFSSDFDELSGWMNEKTAAINADELPTDVAGGEVLLDRHQQHKHEIDSYNDRFESARETGQDLLNANHEASDEVREKMEILTKNWAALLELWNKRHHQYEQCLDFHLFYRDSEQVDSWMSRQEAFLENEDLGNSLGSAEALLQKHEDFEEAFTAQEEKITTVDKTATKLIGDNHYDSDNIEAIRDGLLARRDALREKAATRHRLLKESLLLQKLYEDSDDLKNWINKKKKLADDEDYKDIQNLKSRVQKQQVFEKELEVNKTLLENIQKTGQEMIEGGHYASDNVTTRLSEVVSLWKELMEATEQKGTQLHEANQQLQFENNAEDLQHWLEDVEWQVTSEDYGKGLADVQNRLRKHGLLESAVAARQDQVDTLTDLAAYFEEIGHPDSKDIRARQESLVCRFEALKEPLATRKKNLLDRLHLQLICRDTEDEEAWIQETEPSATSTYLGKDLIASKKLLNRHRVILENIASHEPRIQEITERGNKMVEEGHFAAEDVASRVKSLNQNMESLCARAARRQNNLEANVQFQQYLADLHEAETWIREKEPIVDNTNYGADEEAAGALLKKHEAFLLDLNSFGDSMKALRNQANACQQQQAAPVEGAAGEQRVMALYDFQARSPREVTMKKGDVLTLLSSINKDWWKVEAADHQGIVPAVYVRRLAHDEFPMLPQRRREEPGNITQRQEQIENQYRSLLDRAEERRRRLLQRYNEFLLAYEAGDMLEWIQEKKAENTGVELDDVWELQKKFDEFQKDLNTNEPRLRDINKVADDLLFEGLLTPEGAQIRQELNARWGSLQRLADEQRQLLGSAHAVEVFHREADDTKEQIEKKCQALSAADPGSDLFSVQALQRRHEGFERDLVPLGDKVTILGETAERLSESHPDATEDLQRQKMELNEAWEDLQGRTKDRKESLNEAQKFYLFLSKARDLQNWISNIGGMVSSQELAEDLTGIEILLERHQEHHADMEAKAPTFQALEDFSAELIDSGHHASPEIEKKLQAVKLERDDLEKAWEQRKKILDQCLELQMFQGNCDQVESWMVARENSLRSDDKGSLDSLEALMKKREDLDKAITAQEGKITDLEHFAESLIADEHYAKEEIATRLQRVLDRWKALKAQLIDERTKLGDYADLKQFYQNLEELEEWISEMLPTACDESYKDPTNIQANNIISVSFSLQRKYLKHQTFANEVDGRSKQVHDVINLGNSLIERSACDGNEEAMKEQLERLKEHWDHLLERTNDKGQKLNEASRQQRFNTSIRDFEFWLSEAETLLAMKDQARDLASAGNLLKKHQLLETEMLAREDALKDLNTLAEDLLSSGTFNVDQIMEKKDNVNKRFLNVQELAAAHHEKLKEAYALFQFFQDLDDEESWIEEKLIRVSSQDYGRDLQGVQNLLKKHKRLEGELVAHEPAIQNVLDMAEKLKDKAAVGQEEIQLRLAQFVEHWEKLKELAKARGLKLEESLEYLQFMQNAEEEEAWINEKNALAVRGDSGDTLAATQSLLMKHEALENDFAVHETRVQNVCAQGEDILNKVSYQNKEISSKIEALNEKTPSLAKAIAAWKLQLEDDYAFQEFNWKADVVEAWIADKETSLKTNGNGADLGDFLTLLAKQDTLDASLQSFQQERLPEITDLKDKLISAQHNQSKAIEERYAALLKRWEQLLEASAVHRQKLLEKQLPLQKAEDLFVEFAHKASALNNWCEKMEENLSEPVHCVSLNEIRQLQKDHEDFLASLAGAQADFKCLLELDQQIKALGVPSSPYTWLTVEVLERTWKHLSDIIEEREQELQKEEARQVKNFEMCQEFEQNASTFLQWILETRAYFLDGSLLKETGTLESQLEANKRKQKEIQAMKRQLTKIVDLGDNLEDALILDIKYSTIGLAQQWDQLYQLGLRMQHNLEQQIQAKDTKGVSEETLKEFSTIYKHFDENLTGRLTHKEFRSCLRGLNYYLPMVEEDEHEPKFEKFLDAVDPGRKGYVSLEDYTAFLIDKESENIKSSDEIENAFQALAEGKSYITKEDMKQALTPEQVSFCATHMQQYMDPRGRSHLSGYDYVGFTNSCFGN

SEQ ID NO: 65 - protein, 2416 aa, Pan troglodytes
MEQFPKETVVESSGPKVLETAEEIQERRQEVLTRYQSFKERVAERGQKLEDSYHLQVFKRDADDLGKWIMEKVNILTDKSYEDPTNIQGKYQKHQSLEAEVQTKSRLMSELEKTREERFTMGHSAHEETKAHIEELRRLWDLLLELTLEKGALLLRALKFQQYVQECADILEWIGDKEAIATSVELGEDWERTEVLHKKFEDFQVELVAKEGRVVEVNQYANECAEENHPDLPLIQSKQNEVNAAWERLRGLALQRQKALSNAADLQRFKRDVTEAIQWIKEKEPVLTSEDYGKDLVASEGLFHSHKGLERNLAVMSDKVKELCAKAEKLTLSHPSDAPQIQEMKEDLVANWEHIRALATSRYEKLQATYWYHRFSSDFDELSGWMNEKTAAINADELPTDVAGGEVLLDRHQQHKHEIDSYNDRFESARETGQDLLNANHEASDEVREKMEILTKNWAALLELWNKRHHQYEQCLDFHLFYRDSEQVDSWMSRQEAFLENEDLGNSLGSAEALLQKHEDFEEAFTAQEEKITTVDKTATKLIGDNHYDSDNIEAIRDGLLARRDALREKAATRHRLLKESLLLQKLYEDSDDLKNWINKKKKLADDEDYKDIQNLKSRVQKQQVFEKELEVNKTLLENIQKTGQEMIEGGHYASDNVTTRLSEVVSLWKELMEATEQKGTQLHEANQQLQFENNAEDLQHWLEDVEWQVTSEDYGKGLADVQNRLRKHGLLESAVAARQDQVDTLTDLAAYFEEIGHPDSKDIRARQESLVCRFEALKEPLATRKKNLLDRLHLQLICRDTEDEEAWIQETEPSATSTYLGKDLIASKKLLNRHRVILENIASHEPRIQEITERGNKMVEEGHFAAEDVASRVKSLNQNMESLCARAARRQNNLEANVQFQQYLADLHEAETWIREKEPIVDNTNYGADEEAAGALLKKHEAFLLDLNSFGDSMKALRNQANACQQQQAAPVEGAAGEQRVMALYDFQARSPREVTMKKGDVLTLLSSINKDWWKVEAADHQGIVPAVYVRRLAHDEFPMLPQRRREEPGNITQRQEQIENQYRSLLDRAEERRRRLLQRYNEFLLAYEAGDMLEWIQEKKAENTGVELDDVWELQKKFDEFQKDLNTNEPRLRDINKVADDLLFEGLLTPEGAQIRQELNARWGSLQRLADEQRQLLGSAHAVEVFHREADDTKEQIEKKCQALSAADPGSDLFSVQALQRRHEGFERDLVPLGDKVTILGETAERLSESHPDATEDLQRQKMELNEAWEDLQGRTKDRKESLNEAQKFYLFLSKARDLQNWISNIGGMVSSQELAEDLTGIEILLERHQEHHADMEAKAPTFQALEDFSAELIDSGHHASPEIEKKLQAVKLERDDLEKAWEQRKKILDQCLELQMFQGNCDQVESWMVARENSLRSDDKGSLDSLEALMKKREDLDKAITAQEGKITDLEHFAESLIADEHYAKEEIATRLQRVLDRWKALKAQLIDERTKLGDYADLKQFYQNLEELEEWISEMLPTACDESYKDPTNIQRKYLKHQTFANEVDGRSKQVHDVINLGNSLIERSACDGNEEAMKEQLERLKEHWDHLLERTNDKGQKLNEASRQQRFNTSIRDFEFWLSEAETLLAMKDQARDLASAGNLLKKHQLLETEMLAREDALKDLNTLAEDLLSSGTFNVDQIMEKKDNVNKRFLNVQELAAAHHEKLKEAYALFQFFQDLDDEESWIEEKLIRVSSQDYGRDLQGVQNLLKKHKRLEGELVAHEPAIQNVLDMAEKLKDKAAVGQEEIQLRLAQFVEHWEKLKELAKARGLKLEESLEYLQFMQNAEEEEAWINEKNALAVRGDSGDTLAATQSLLMKHEALENDFAVHETRVQNVCAQGEDILNKVSYQNKEISSKIEALNEKTPSLAKAIAAWKLQLEDDYAFQEFNWKADVVEAWIADKETSLKTNGNGADLGDFLTLLAKQDTLDASLQSFQQERLPEITDLKDKLISAQHNQSKAIEERYAALLKRWEQLLEASAVHRQKLLEKQLPLQKAEDLFVEFAHKASALNNWCEKMEENLSEPVHCVSLNEIRQLQKDHEDFLASLAGAQADFKCLLELDQQIKALGVPSSPYTWLTVEVLERTWKHLSDIIEEREQELQKEEARQVKNFEMCQEFEQNASTFLQWILETRAYFLDGSLLKETGTLESQLEANKRKQKEIQAMKRQLTKIVDLGDNLEDALILDIKYSTIGLAQQWDQLYQLGLRMQHNLEQQIQAKDTKGVSEETLKEFSTIYKHFDENLTGRLTHKEFRSCLRGLNYYLPMVEEDEHEPKFEKFLDAVDPGRKGYVSLEDYTAFLIDKESENIKSSDEIENAFQALAEGKSYITKEDMKQALTPEQVSFCATHMQQYMDPRGRSHLSGYDYVGFTNSCFGN

SEQ ID NO: 66 - protein, 2419 aa, Pan troglodytes
MEQFPKETVVESSGPKVLETAEEIQERRQEVLTRYQSFKERVAERGQKLEDSYHLQVFKRDADDLGKWIMEKVNILTDKSYEDPTNIQGKYQKHQSLEAEVQTKSRLMSELEKTREERFTMGHSAHEETKAHIEELRRLWDLLLELTLEKGALLLRALKFQQYVQECADILEWIGDKEAIATSVELGEDWERTEVLHKKFEDFQVELVAKEGRVVEVNQYANECAEENHPDLPLIQSKQNEVNAAWERLRGLALQRQKALSNAADLQRFKRDVTEAIQWIKEKEPVLTSEDYGKDLVASEGLFHSHKGLERNLAVMSDKVKELCAKAEKLTLSHPSDAPQIQEMKEDLVANWEHIRALATSRYEKLQATYWYHRFSSDFDELSGWMNEKTAAINADELPTDVAGGEVLLDRHQQHKHEIDSYNDRFESARETGQDLLNANHEASDEVREKMEILTKNWAALLELWNKRHHQYEQCLDFHLFYRDSEQVDSWMSRQEAFLENEDLGNSLGSAEALLQKHEDFEEAFTAQEEKITTVDKTATKLIGDNHYDSDNIEAIRDGLLARRDALREKAATRHRLLKESLLLQKLYEDSDDLKNWINKKKKLADDEDYKDIQNLKSRVQKQQVFEKELEVNKTLLENIQKTGQEMIEGGHYASDNVTTRLSEVVSLWKELMEATEQKGTQLHEANQQLQFENNAEDLQHWLEDVEWQVTSEDYGKGLADVQNRLRKHGLLESAVAARQDQVDTLTDLAAYFEEIGHPDSKDIRARQESLVCRFEALKEPLATRKKNLLDRLHLQLICRDTEDEEAWIQETEPSATSTYLGKDLIASKKLLNRHRVILENIASHEPRIQEITERGNKMVEEGHFAAEDVASRVKSLNQNMESLCARAARRQNNLEANVQFQQYLADLHEAETWIREKEPIVDNTNYGADEEAAGALLKKHEAFLLDLNSFGDSMKALRNQANACQQQQAAPVEGAAGEQRVMALYDFQARSPREVTMKKGDVLTLLSSINKDWWKVEAADHQGIVPAVYVRRLAHDEFPMLPQRRREEPGNITQRQEQIENQYRSLLDRAEERRRRLLQRYNEFLLAYEAGDMLEWIQEKKAENTGVELDDVWELQKKFDEFQKDLNTNEPRLRDINKVADDLLFEGLLTPEGAQIRQELNARWGSLQRLADEQRQLLGSAHAVEVFHREADDTKEQIEKKCQALSAADPGSDLFSVQALQRRHEGFERDLVPLGDKVTILGETAERLSESHPDATEDLQRQKMELNEAWEDLQGRTKDRKESLNEAQKFYLFLSKARDLQNWISNIGGMVSSQELAEDLTGIEILLERHQEHHADMEAKAPTFQALEDFSAELIDSGHHASPEIEKKLQAVKLERDDLEKAWEQRKKILDQCLELQMFQGNCDQVESWMVARENSLRSDDKGSLDSLEALMKKREDLDKAITAQEGKITDLEHFAESLIADEHYAKEEIATRLQRVLDRWKALKAQLIDERTKLGDYADLKQFYQNLEELEEWISEMLPTACDESYKDPTNIQRKYLKHQTFANEVDGRSKQVHDVINLGNSLIERSACDGNEEAMKEQLERLKEHWDHLLERTNDKGQKLNEASRQQRFNTSIRDFEFWLSEAETLLAMKDQARDLASAGNLLKKHQLLETEMLAREDALKDLNTLAEDLLSSGTFNVDQIMEKKDNVNKRFLNVQELAAAHHEKLKEAYALFQFFQDLDDEESWIEEKLIRVSSQDYGRDLQGVQNLLKKHKRLEGELVAHEPAIQNVLDMAEKLKDKAAVGQEEIQLRLAQFVEHWEKLKELAKARGLKLEESLEYLQFMQNAEEEEAWINEKNALAVRGDSGDTLAATQSLLMKHEALENDFAVHETRVQNVCAQGEDILNKVLQEESQNKEISSKIEALNEKTPSLAKAIAAWKLQLEDDYAFQEFNWKADVVEAWIADKETSLKTNGNGADLGDFLTLLAKQDTLDASLQSFQQERLPEITDLKDKLISAQHNQSKAIEERYAALLKRWEQLLEASAVHRQKLLEKQLPLQKAEDLFVEFAHKASALNNWCEKMEENLSEPVHCVSLNEIRQLQKDHEDFLASLAGAQADFKCLLELDQQIKALGVPSSPYTWLTVEVLERTWKHLSDIIEEREQELQKEEARQVKNFEMCQEFEQNASTFLQWILETRAYFLDGSLLKETGTLESQLEANKRKQKEIQAMKRQLTKIVDLGDNLEDALILDIKYSTIGLAQQWDQLYQLGLRMQHNLEQQIQAKDTKGVSEETLKEFSTIYKHFDENLTGRLTHKEFRSCLRGLNYYLPMVEEDEHEPKFEKFLDAVDPGRKGYVSLEDYTAFLIDKESENIKSSDEIENAFQALAEGKSYITKEDMKQALTPEQVSFCATHMQQYMDPRGRSHLSGYDYVGFTNSCFGN

SEQ ID NO: 67 - protein, 2137 aa, Pan troglodytes
MTSATEFENVGNQPPYSRINARWDAPDDELDNDNSSARLFERSRIKALADEREVVQKKTFTKWVNSHLARVSCRITDLYKDLRDGRMLIKLLEVLSGEMLPKPTKGKMRIHCLENVDKALQFLKEQRVHLENMGSHDIVDGNHRLVLGLIWTIILRFQIQDIVVETQEGRETRSAKDALLLWCQMKTAGYPHVNITNFTSSWKDGLAFNALIHKHRPDLIDFDKLKDSNARHNLEHAFDVAERQLGIIPLLDPEDVFTENPDEKSIITYVVAFYHYFSKMKVLAVEGKRVGKVIDHAIETEKMIEKYSGLASDLLTWIEQTITVLNSRKFANSLTGVQQQLQAFSTYRTVEKPPKFQEKGNLEVLLFTIQSRMRANNQKVYTPHDGKLVSDINRAWESLEEAEYRRELALRNELIRQEKLEQLARRFDRKAAMRETWLNENQRLVAQDNFGYDLAAVEAAKKKHEAIETDTAAYEERVRALEDLAQELEKENYHDQKRITARKDNILRLWSYLQELLQSRRQRLETTLALQKLFQDMLHSINWMDEIKAHLLSAEFGKHLLEVEDLLQKHKLMEADIAIQGDKVKAITAATLKFTEGKGYQPCDPQVIQDRISHLEQCFEELSNMAAGRKAQLEQSKRLWKFFWEMDEAESWIKEKEQIYSSLDYGKDLTSVLILQRKHKAFEDELRGLDAHLEQIFQEAHDMVARKQFGHPHIEARIKEVSAQWDQLKDLAAFCKKNLQDAENFFQFQGDADDLKAWLQDAHRLLSGEDVGQDEGATRALGKKHKDFLEELEESRGVMEHLEQQAQGFPEEFRDSPDVTHRLQALRELYQQVVAQADLRQQRLQEALDLYTVFGETDACELWMGEKEKWLAEMEMPDTLEDLEVVQHRFDILDQEMKTLMTQIDGVNLAANSLVESGHPRSREVKQYQDHLNTRWQAFQTLVSERREAVDSALRVHNYCVDCEETSKWITDKTKVVESTKDLGRDLAGIIAIQRKLSGLERDVAAIQARVDALERESQQLMDSHPEQKEDIGQRQKHLEELWQGLQQSLQGQEDLLGEVSQLQAFLQDLDDFQAWLSITQKAVASEDMPESLPEAEQLLQQHAGIKDEIDGHQDSYQRVKESGEKVIQGQTDPEYLLLGQRLEGLDTGWDALGRMWESRSHTLAQCLGFQEFQKDAKQAEAILSNQEYTLAHLEPPDSLEAAEAGIRKFEDFLGSMENNRDKVLSPVDSGNKLVAEGNLYSDKIKEKVQLIEDRHRKNNEKAQEASVLLRDNLELQNFLQNCQELTLWINDKLLTSQDVSYDEARNLHNKWLKHQAFVAELASHEGWLENIDAEGKQLMDEKPQFTALVSQKLEALHRLWDELQATTKEKTQHLSAARSSDLRLQTHADLNKWISAMEDQLRSDDPGKDLTSVNRMLAKLKRVEDQVNVRKEELGELFAQVPSMGEEGGDADLSIEKRFLDLLEPLGRRKKQLESSRAKLQISRDLEDETLWVEERLPLAQSADYGTNLQTVQLFMKKNQTLQNEILGHTPRVEDVLQRGQQLVEAAEIDCQDLEERLGHLQSSWDRLREAAAGRLQRLRDANEAQQYYLDADEAEAWIGEQELYVISDEIPKDEEGAIVMLKRHLRQQRAVEDYGRNIKQLASRAQGLLSAGHPEGEQIIRLQGQVDKHYAGLKDVAEERKRKLENMYHLFQLKRETDDLEQWISEKELVASSPEMGQDFDHVTLLRDKFRDFARETGAIGQERVDNVNAFIERLIDAGHSEAATIAEWKDGLNEMWADLLELIDTRMQLLAASYDLHRYFYTGAEILGLIDEKHRELPEDVGLDASTAESFHRVHTAFERELHLLGVQVQQFQDVATRLQTAYAGEKAEAIQNKEQEVSAAWQALLDACAGRRTQLVDTADKFRFFSMARDLLSWMESIIRQIETQERPRDVSSVELLMKYHQGINAEIETRSKNFSACLELGESLLQRQHQASEEIREKLQQVMSRRKEMNEKWEARWERLRMLLEVCQFSRDASVAEAWLIAQEPYLASGDFGHTVDSVEKLIKRHEAFEKSTASWAERFAALEKPTTLELKERQIAERPAEETGPQEEEGETAGEAPVSHHAATERTSPVSLWSRLSSSWESLQPEPSHPY

SEQ ID NO: 68 - protein, 2338 aa, Pan troglodytes
MTSATEFENVGNQPPYSRINARWDAPDDELDNDNSSARLFERSRIKALADEREVVQKKTFTKWVNSHLARVSCRITDLYKDLRDGRMLIKLLEVLSGEMLPKPTKGKMRIHCLENVDKALQFLKEQRVHLENMGSHDIVDGNHRLVLGLIWTIILRFQIQDIVVETQEGRETRSAKDALLLWCQMKTAGYPHVNITNFTSSWKDGLAFNALIHKHRPDLIDFDKLKDSNARHNLEHAFDVAERQLGIIPLLDPEDVFTENPDEKSIITYVVAFYHYFSKMKVLAVEGKRVGKVIDHAIETEKMIEKYSGLASDLLTWIEQTITVLNSRKFANSLTGVQQQLQAFSTYRTVEKPPKFQEKGNLEVLLFTIQSRMRANNQKVYTPHDGKLVSDINRAWESLEEAEYRRELALRNELIRQEKLEQLARRFDRKAAMRETWLNENQRLVAQDNFGYDLAAVEAAKKKHEAIETDTAAYEERVRALEDLAQELEKENYHDQKRITARKDNILRLWSYLQELLQSRRQRLETTLALQKLFQDMLHSINWMDEIKAHLLSAEFGKHLLEVEDLLQKHKLMEADIAIQGDKVKAITAATLKFTEGKGYQPCDPQVIQDRISHLEQCFEELSNMAAGRKAQLEQSKRLWKFFWEMDEAESWIKEKEQIYSSLDYGKDLTSVLILQRKHKAFEDELRGLDAHLEQIFQEAHDMVARKQFGHPHIEARIKEVSAQWDQLKDLAAFCKKNLQDAENFFQFQGDADDLKAWLQDAHRLLSGEDVGQDEGATRALGKKHKDFLEELEESRGVMEHLEQQAQGFPEEFRDSPDVTHRLQALRELYQQVVAQADLRQQRLQEALDLYTVFGETDACELWMGEKEKWLAEMEMPDTLEDLEVVQHRFDILDQEMKTLMTQIDGVNLAANSLVESGHPRSREVKQYQDHLNTRWQAFQTLVSERREAVDSALRVHNYCVDCEETSKWITDKTKVVESTKDLGRDLAGIIAIQRKLSGLERDVAAIQARVDALERESQQLMDSHPEQKEDIGQRQKHLEELWQGLQQSLQGQEDLLGEVSQLQAFLQDLDDFQAWLSITQKAVASEDMPESLPEAEQLLQQHAGIKDEIDGHQDSYQRVKESGEKVIQGQTDPEYLLLGQRLEGLDTGWDALGRMWESRSHTLAQCLGFQEFQKDAKQAEAILSNQEYTLAHLEPPDSLEAAEAGIRKFEDFLGSMENNRDKVLSPVDSGNKLVAEGNLYSDKIKEKVQLIEDRHRKNNEKAQEASVLLRDNLELQNFLQNCQELTLWINDKLLTSQDVSYDEARNLHNKWLKHQAFVAELASHEGWLENIDAEGKQLMDEKPQFTALVSQKLEALHRLWDELQATTKEKTQHLSAARSSDLRLQTHADLNKWISAMEDQLRSDDPGKDLTSVNRMLAKLKALEDQVNVRKEELGELFAQVPSMGEEGGDADLSIEKRFLDLLEPLGRRKKQLESSRAKLQISRDLEDETLWVEERLPLAQSADYGTNLQTVQLFMKKNQTLQNEILGHTPRVEDVLQRGQQLVEAAEIDCQDLEERLGHLQSSWDRLREAAAGRLQRLRDANEAQQYYLDADEAEAWIGEQELYVISDEIPKDEEGAIVMLKRHLRQQRAVEDYGRNIKQLASRAQGLLSAGHPEGEQIIRLQGQVDKHYAGLKDVAEERKRKLENMYHLFQLKRETDDLEQWISEKELVASSPEMGQDFDHVTLLRDKFRDFARETGAIGQERVDNVNAFIERLIDAGHSEAATIAEWKDGLNEMWADLLELIDTRMQLLAASYDLHRYFYTGAEILGLIDEKHRELPEDVGLDASTAESFHRVHTAFERELHLLGVQVQQFQDVATRLQTAYAGEKAEAIQNKEQEVSAAWQALLDACAGRRTQLVDTADKFRFFSMARDLLSWMESIIRQIETQERPRDVSSVELLMKYHQGINAEIETRSKNFSACLELGESLLQRQHQASEEIREKLQQVMSRRKEMNEKWEARWERLRMLLEVCQFSRDASVAEAWLIAQEPYLASGDFGHTVDSVEKLIKRHEAFEKSTASWAERFAALEKPTTVSREQCWEAQEDELAQPRPPSSPHPCTHLALEGSSQAQWLTGDGKEVCPEGGPGLRGSPRHRPSPDVYPSQSAGSTERPQAQASSPIPCPAAARGGARALPGDEPATLLAPRDHGQSVQMEGYLGRKHDLEGPNKKASNRSWNNLYCVLRNSELTFYKDAKNLALGMPYHGEEPLALRHAICEIAANYKKKKHVFKLRLSNGSEWLFHGKDEEEMLSWLQGVSTAINESQSIRIKAQSLPLPSLSGPDASLGKKEKRFSFFPKKK

SEQ ID NO: 69 - protein, 2360 aa, Pan troglodytes
MTSATEFENVGNQPPYSRINARWDAPDDELDNDNSSARLFERSRIKALADEREVVQKKTFTKWVNSHLARVSCRITDLYKDLRDGRMLIKLLEVLSGEMLPKPTKGKMRIHCLENVDKALQFLKEQRVHLENMGSHDIVDGNHRLVLGLIWTIILRFQIQDIVVETQEGRETRSAKDALLLWCQMKTAGYPHVNITNFTSSWKDGLAFNALIHKHRPDLIDFDKLKDSNARHNLEHAFDVAERQLGIIPLLDPEDVFTENPDEKSIITYVVAFYHYFSKMKVLAVEGKRVGKVIDHAIETEKMIEKYSGLASDLLTWIEQTITVLNSRKFANSLTGVQQQLQAFSTYRTVEKPPKFQEKGNLEVLLFTIQSRMRANNQKVYTPHDGKLVSDINRAWESLEEAEYRRELALRNELIRQEKLEQLARRFDRKAAMRETWLNENQRLVAQDNFGYDLAAVEAAKKKHEAIETDTAAYEERVRALEDLAQELEKENYHDQKRITARKDNILRLWSYLQELLQSRRQRLETTLALQKLFQDMLHSINWMDEIKAHLLSAEFGKHLLEVEDLLQKHKLMEADIAIQGDKVKAITAATLKFTEGKGYQPCDPQVIQDRISHLEQCFEELSNMAAGRKAQLEQSKRLWKFFWEMDEAESWIKEKEQIYSSLDYGKDLTSVLILQRKHKAFEDELRGLDAHLEQIFQEAHDMVARKQFGHPHIEARIKEVSAQWDQLKDLAAFCKKNLQDAENFFQFQGDADDLKAWLQDAHRLLSGEDVGQDEGATRALGKKHKDFLEELEESRGVMEHLEQQAQGFPEEFRDSPDVTHRLQALRELYQQVVAQADLRQQRLQEALDLYTVFGETDACELWMGEKEKWLAEMEMPDTLEDLEVVQHRFDILDQEMKTLMTQIDGVNLAANSLVESGHPRSREVKQYQDHLNTRWQAFQTLVSERREAVDSALRVHNYCVDCEETSKWITDKTKVVESTKDLGRDLAGIIAIQRKLSGLERDVAAIQARVDALERESQQLMDSHPEQKEDIGQRQKHLEELWQGLQQSLQGQEDLLGEVSQLQAFLQDLDDFQAWLSITQKAVASEDMPESLPEAEQLLQQHAGIKDEIDGHQDSYQRVKESGEKVIQGQTDPEYLLLGQRLEGLDTGWDALGRMWESRSHTLAQCLGFQEFQKDAKQAEAILSNQEYTLAHLEPPDSLEAAEAGIRKFEDFLGSMENNRDKVLSPVDSGNKLVAEGNLYSDKIKEKVQLIEDRHRKNNEKAQEASVLLRDNLELQNFLQNCQELTLWINDKLLTSQDVSYDEARNLHNKWLKHQAFVAELASHEGWLENIDAEGKQLMDEKPQFTALVSQKLEALHRLWDELQATTKEKTQHLSAARSSDLRLQTHADLNKWISAMEDQLRSDDPGKDLTSVNRMLAKLKRVEDQVNVRKEELGELFAQVPSMGEEGGDADLSIEKRFLDLLEPLGRRKKQLESSRAKLQISRDLEDETLWVEERLPLAQSADYGTNLQTVQLFMKKNQTLQNEILGHTPRVEDVLQRGQQLVEAAEIDCQDLEERLGHLQSSWDRLREAAAGRLQRLRDANEAQQYYLDADEAEAWIGEQELYVISDEIPKDEEGAIVMLKRHLRQQRAVEDYGRNIKQLASRAQGLLSAGHPEGEQIIRLQGQVDKHYAGLKDVAEERKRKLENMYHLFQLKRETDDLEQWISEKELVASSPEMGQDFDHVTLLRDKFRDFARETGAIGQERVDNVNAFIERLIDAGHSEAATIAEWKDGLNEMWADLLELIDTRMQLLAASYDLHRYFYTGAEILGLIDEKHRELPEDVGLDASTAESFHRVHTAFERELHLLGVQVQQFQDVATRLQTAYAGEKAEAIQNKEQEVSAAWQALLDACAGRRTQLVDTADKFRFFSMARDLLSWMESIIRQIETQERPRDVSSVELLMKYHQGINAEIETRSKNFSACLELGESLLQRQHQASEEIREKLQQVMSRRKEMNEKWEARWERLRMLLEVCQFSRDASVAEAWLIAQEPYLASGDFGHTVDSVEKLIKRHEAFEKSTASWAERFAALEKPTTLELKERQIAERPAEETGPQEEEGETAGEAPVSHHAATERTSPGEEEGTWPQNLQQPPLPGQHKDGQKSTGDERPATEPLFKVLDTPLSEGDEPATLLAPRDHGQSVQMEGYLGRKHDLEGPNKKASNSKGEEGEERRETEEEDEEEETESVAVEMQQHASHVSWNNLYCVLRNSELTFYKDAKNLALGMPYHGEEPLALRHAICEIAANYKKKKHVFKLRLSNGSEWLFHGKDEEEMLSWLQGVSTAINESQSIRIKAQSLPLPSLSGPDASLGKKEKRFSFFPKKK

SEQ ID NO: 70 - protein, 2326 aa, Pan troglodytes
MTSATEFENVGNQPPYSRINARWDAPDDELDNDNSSARLFERSRIKALADEREVVQKKTFTKWVNSHLARVSCRITDLYKDLRDGRMLIKLLEVLSGEMLPKPTKGKMRIHCLENVDKALQFLKEQRVHLENMGSHDIVDGNHRLVLGLIWTIILRFQIQDIVVETQEGRETRSAKDALLLWCQMKTAGYPHVNITNFTSSWKDGLAFNALIHKHRPDLIDFDKLKDSNARHNLEHAFDVAERQLGIIPLLDPEDVFTENPDEKSIITYVVAFYHYFSKMKVLAVEGKRVGKVIDHAIETEKMIEKYSGLASDLLTWIEQTITVLNSRKFANSLTGVQQQLQAFSTYRTVEKPPKFQEKGNLEVLLFTIQSRMRANNQKVYTPHDGKLVSDINRAWESLEEAEYRRELALRNELIRQEKLEQLARRFDRKAAMRETWLNENQRLVAQDNFGYDLAAVEAAKKKHEAIETDTAAYEERVRALEDLAQELEKENYHDQKRITARKDNILRLWSYLQELLQSRRQRLETTLALQKLFQDMLHSINWMDEIKAHLLSAEFGKHLLEVEDLLQKHKLMEADIAIQGDKVKAITAATLKFTEGKGYQPCDPQVIQDRISHLEQCFEELSNMAAGRKAQLEQSKRLWKFFWEMDEAESWIKEKEQIYSSLDYGKDLTSVLILQRKHKAFEDELRGLDAHLEQIFQEAHDMVARKQFGHPHIEARIKEVSAQWDQLKDLAAFCKKNLQDAENFFQFQGDADDLKAWLQDAHRLLSGEDVGQDEGATRALGKKHKDFLEELEESRGVMEHLEQQAQGFPEEFRDSPDVTHRLQALRELYQQVVAQADLRQQRLQEALDLYTVFGETDACELWMGEKEKWLAEMEMPDTLEDLEVVQHRFDILDQEMKTLMTQIDGVNLAANSLVESGHPRSREVKQYQDHLNTRWQAFQTLVSERREAVDSALRVHNYCVDCEETSKWITDKTKVVESTKDLGRDLAGIIAIQRKLSGLERDVAAIQARVDALERESQQLMDSHPEQKEDIGQRQKHLEELWQGLQQSLQGQEDLLGEVSQLQAFLQDLDDFQAWLSITQKAVASEDMPESLPEAEQLLQQHAGIKDEIDGHQDSYQRVKESGEKVIQGQTDPEYLLLGQRLEGLDTGWDALGRMWESRSHTLAQCLGFQEFQKDAKQAEAILSNQEYTLAHLEPPDSLEAAEAGIRKFEDFLGSMENNRDKVLSPVDSGNKLVAEGNLYSDKIKEKVQLIEDRHRKNNEKAQEASVLLRDNLELQNFLQNCQELTLWINDKLLTSQDVSYDEARNLHNKWLKHQAFVAELASHEGWLENIDAEGKQLMDEKPQFTALVSQKLEALHRLWDELQATTKEKTQHLSAARSSDLRLQTHADLNKWISAMEDQLRSDDPGKDLTSVNRMLAKLKRVEDQVNVRKEELGELFAQVPSMGEEGGDADLSIEKRFLDLLEPLGRRKKQLESSRAKLQISRDLEDETLWVEERLPLAQSADYGTNLQTVQLFMKKNQTLQNEILGHTPRVEDVLQRGQQLVEAAEIDCQDLEERLGHLQSSWDRLREAAAGRLQRLRDANEAQQYYLDADEAEAWIGEQELYVISDEIPKDEEGAIVMLKRHLRQQRAVEDYGRNIKQLASRAQGLLSAGHPEGEQIIRLQGQVDKHYAGLKDVAEERKRKLENMYHLFQLKRETDDLEQWISEKELVASSPEMGQDFDHVTLLRDKFRDFARETGAIGQERVDNVNAFIERLIDAGHSEAATIAEWKDGLNEMWADLLELIDTRMQLLAASYDLHRYFYTGAEILGLIDEKHRELPEDVGLDASTAESFHRVHTAFERELHLLGVQVQQFQDVATRLQTAYAGEKAEAIQNKEQEVSAAWQALLDACAGRRTQLVDTADKFRFFSMARDLLSWMESIIRQIETQERPRDVSSVELLMKYHQGINAEIETRSKNFSACLELGESLLQRQHQASEEIREKLQQVMSRRKEMNEKWEARWERLRMLLEVCQFSRDASVAEAWLIAQEPYLASGDFGHTVDSVEKLIKRHEAFEKSTASWAERFAALEKPTTLELKERQIAERPAEETGPQEEEGETAGEAPVSHHAATERTSPGEEEGTWPQNLQQPPLPGQHKDGQKSTGDERPATEPLFKVLDTPLSEGDEPATLLAPRDHGQSVQMEGYLGRKHDLEGPNKKASNRSWNNLYCVLRNSELTFYKDAKNLALGMPYHGEEPLALRHAICEIAANYKKKKHVFKLRLSNGSEWLFHGKDEEEMLSWLQGVSTAINESQSIRIKAQSLPLPSLSGPDASLGKKEKRFSFFPKKK

SEQ ID NO: 71 - protein, 2278 aa, Pan troglodytes
MTTTVATDYDNIEIQQQYSDVNNRWDVDDWDNENSSARLFERSRIKALADEREAVQKKTFTKWVNSHLARVSCRITDLYTDLRDGRMLIKLLEVLSGERLPKPTKGRMRIHCLENVDKALQFLKEQRVHLENMGSHDIVDGNHRLTLGLIWTIILRFQIQDISVETEDNKEKKSAKDALLLWCQMKTAGYPNVNIHNFTTSWRDGMAFNALIHKHRPDLIDFDKLKKSNAHYNLQNAFNLAEQHLGLTKLLDPEDISVDHPDEKSIITYVVTYYHYFSKMKALAVEGKRIGKVLDNAIETEKMIEKYESLASDLLEWIEQTIIILNNRKFANSLVGVQQQLQAFNTYRTVEKPPKFTEKGNLEVLLFTIQSKMRANNQKVYMPREGKLISDINKAWERLEKAEHERELALRNELIRQEKLEQLARRFDRKAAMRETWLSENQRLVSQDNFGFDLPAVEAATKKHEAIETDIAAYEERVQAVVAVARELEAENYHDIKRITARKDNVIRLWEYLLELLRARRQRLEMNLGLQKIFQEMLYIMDWMDEMKVLVLSQDYGKHLLGVEDLLQKHTLVEADIGIQAERVRGVNASAQKFATDGEGYKPCDPQVIRDRVAHMEFCYQELCQLAAERRARLEESRRLWKFFWEMAEEEGWIREKEKILSSDDYGKDLTSVMRLLSKHRAFEDEMSGRSGHFEQAIKEGEDMIAEEHFGSEKIRERIIYIREQWANLEQLSAIRKKRLEEASLLHQFQADADDIDAWMLDILKIVSSSDVGHDEYSTQSLVKKHKDVAEEIANYRPTLDTLHEQASALPQEHAESPDVRGRLSGIEERYKEVAELTRLRKQALQDTLALYKMFSEADACELWIDEKEQWLNNMQIPEKLEDLEVIQHRFESLEPEMNNQASRVAVVNQIARQLMHSGHPSEKEIKAQQDKLNTRWSQFRELVDRKKDALLSALSIQNYHLECNETKSWIREKTKVIESTQDLGNDLAGVMALQRKLTGMERDLVAIEAKLSDLQKEAEKLESEHPDQAQAILSRLAEISDVWEEMKTTLKNREASLGEASKLQQFLRDLDDFQSWLSRTQTAIASEDMPNTLTEAEKLLTQHENIKNEIDNYEEDYQKMRDMGEMVTQGQTDAQYMFLRQRLQALDTGWNELHKMWENRQNLLSQSHAYQQFLRDTKQAEAFLNNQEYVLAHTEMPTTLEGAEAAIKKQEDFMTTMDANEEKINAVVETGRRLVSDGNINSDRIQEKVDSIDDRHRKNRETASELLMRLKDNRDLQKFLQDCQELSLWINEKMLTAQDMSYDEARNLHSKWLKHQAFMAELASNKEWLDKIEKEGMQLISEKPETEAVVKEKLTGLHKMWEVLESTTQTKAQRLFDANKAELFTQSCADLDKWLHGLESQIQSDDYGKDLTSVNILLKKQQMLENQMEVRKKEIEELQSQAQALSQEGKSTDEVDSKRLTVQTKFMELLEPLNERKHNLLASKEIHQFNRDVEDEILWVGERMPLATSTDHGHNLQTVQLLIKKNQTLQKEIQGHQPRIDDIFERSQNIVTDSSSLSAEAIRQRLADLKQLWGLLIEETEKRHRRLEEAHRAQQYYFDAAEAEAWMSEQELYMMSEEKAKDEQSAVSMLKKHQILEQAVEDYAETVHQLSKTSRALVADSHPESERISMRQSKVDKLYAGLKDLAEERRGKLDERHRLFQLNREVDDLEQWIAEREVVAGSHELGQDYEHVTMLQERFREFARDTGNIGQERVDTVNHLADELINSGHSDAATIAEWKDGLNEAWADLLELIDTRTQILAASYELHKFYHDAKEIFGRIQDKHKKLPEELGRDQNTVETLQRMHTTFEHDIQALGTQVRQLQEDAARLQAAYAGDKADDIQKRENEVLEAWKSLLDACESRRVRLVDTGDKFRFFSMVRDLMLWMEDVIRQIEAQEKPRDVSSVELLMNNHQGIKAEIDARNDSFTTCIELGKSLLARKHYASEEIKEKLLQLTEKRKEMIDKWEDRWEWLRLILEVHQFSRDASVAEAWLLGQEPYLSSREIGQSVDEVEKLIKRHEAFEKSAATWDERFSALERLTTLELLEVRRQQEEEERKRRPPSPEPSTKVSEEAESQQQWDTSKGEQVSQNGLPAEQGSPRMAETVDTSEMVNGATEQRTSSKESSPIPSPTSDRKAKTALPAQSAATLPARTQETPSAQMEGFLNRKHEWEAHNKKASSRSWHNVYCVINNQEMGFYKDAKTAASGIPYHSEVPVSLKEAVCEVALDYKKKKHVFKLR

SEQ ID NO: 72 - protein, 2299 aa, Pan troglodytes
  misc_feature 1532: Xaa = any naturally occurring amino acid
  misc_feature 1534: Xaa = any naturally occurring amino acid
MSSTLSPTDFDSLEIQGQYSDINNRWDLPDSDWDNDSSSARLFERSRIKALADEREAVQKKTFTKWVNSHLARVTCRVGDLYSDLRDGRNLLRLLEVLSGEILPKPTKGRMRIHCLENVDKALQFLKEQKVHLENMGSHDIVDGNHRLTLGLVWTIILRFQIQDISVETEDNKEKKSAKDALLLWCQMKTAGYPNVNVHNFTTSWRDGLAFNAIVHKHRPDLLDFESLKKCNAHYNLQNAFNLAEKELGLTKLLDPEDVNVDQPDEKSIITYVATYYHYFSKMKALAVEGKRIGKVLDHAMEAERLVEKYESLASELLQWIEQTIVTLNDRQLANSLSGVQNQLQSFNSYRTVEKPPKFTEKGNLEVLLFTIQSKLRANNQKVYTPREGRLISDINKAWERLEKAEHERELALRTELIRQEKLEQLAARFDRKAAMRETWLSENQRLVSQDNFGLELAAVEAAVRKHEAIETDIVAYSGRVQAVDAVAAELAAERYHDIKRIAARQHNVARLWDFLRQMVAARRERLLLNLELQKVFQDLLYLMDWMEEMKGRLQSQDLGRHLAGVEDLLQLHELVEADIAVQAERVRAVSASALRFCNPGKEYRPCDPQLVSERVAKLEQSYEALCELAAARRARLEESRRLWRFLWEVGEAEAWVREQQHLLASADTGRDLTGALRLLNKHTALRGEMSGRLGPLKLTLEQGQQLVAEGHPGASQASARAAELQAQWERLEALAEERAQRLAQAASLYQFQADANDMEAWLVDALRLVSSPELGHDEFSTQALARQHRALEEEIRSHRPTLDALREQAAALPPALSRTPEVQGRVPTLERHYEELQARAGERARALEAALALYTMLSEAGACGLWVEEKEQWLNGLALPERLEDLEVVQQRFETLEPEMNTLAAQITAVNDIAEQLLKANPPGKDRIVNTQEQLNHRWQQFRRLADGKKAALTSALSIQNYHLECTETQAWMREKTKVIESTQGLGNDLAGVLALQRKLAGTERDLEAIAARVGELTREANALAAGHPAQAAAINARLREVQTGWEDLRATMRRREESLGEARRLQDFLRSLDDFQAWLGRTQTAVASEEGPATLPEAEALLAQHAALRGEVERAQSEYSRLRALGEEVTRDQADPQCLFLRQRLEALGTGWEELGRMWESRQGRLAQAHGFQGFLRDARQAEGVLSSQEYVLSHTEMPGTLQAADAAIKKLEDFMNTMDANGERIRGLLEAGRQLVSEGNIHADKIREKADSIERRHKKNQDAAQQFLGRLRDNREQQHFLQDCHELKLWIDEKMLTAQDVSYDEARNLHTKWQKHQAFMAELAANKDWLDKVDKEGRELTLEKPELKALVLEKLRDLHRRWDELETTTQAKARSLFDANRAELFAQSCCALESWLESLQAQLHSDDYGKDLTSVNILLKKQQMLEWEMAVREKEVEAIQAQAKALAQEDQGAGEVERTSRAVEEKFRALCQPMRERCRRLQASREQHQFHRDVEDEILWVTERLPMASSMEHGKDLPSVQLLMKKNQXLXKEIQGHPFRIADLRERQRALGTAAAGPELADLQEMWKRLGHELELRGKRLEEALRAQQFYRDAAEAEAWMGEQELHMMGQEKAKDELSAQAEVKKHQVLEQALADYAQTIHQLAASSQDMIDHEHPESTRISIRQAQVDKLYAGLKELAGERRERLQEHLRLCQLRRELDDLEQWIQEREVVAASHELGQDFEHVTMLRDKFREFSRDTSTIGQERVDSANALANGLIAGGHAARATVAEWKDSLNEAWADLLELLDTRGQVLAAAYELQRFLHGARQALARVQHKQQQLPDGTGRDLNAAEALQRRHCAYEHDIQALSPQVQQVQDDGHRLQKAYAGDKAEEIGRHMQAVAEAWAQLQGSSAARRQLLLDTTDKFRFFKAVRELMLWMDEVNLQMDAQERPRDVSSADLVIKNQQGIKAEIEARADRFSSCIDMGKELLARSHYAAEEISEKLSQLQARRQETAEKWQEKMDWLQLVLEVLVFGRDAGMAEAWLCSQEPLVRSAELGCTVDEVESLIKRHEAFQKSAVAWEERFCALEKLTALEEREKERKRKREEEERRKQPPAPEPTASVPPGDLVGGQTASDTTWDGTQPRPPPSTQAPSVNGVCTDGEPSQPLLGQQRLEPSSFPEGPGPGSGDEANGPRGERQTRTRGPAPSAMPQSRSTESAHAATLPPRGPEPSAQEQMEGMLCRKQEMEAFGKKAANRSWQNVYCVLRRGSLGFYKDAKAASAGVPYHGEVPVSLARAQGSVAFDYRKRKHVFKLG

SEQ ID NO: 73 - protein, 2419 aa, Equus caballus
MASGGPKVLETAEEIQERRREVLNRYQRFKELVAERGQKLEESYHYQVFRRDADDLEKWIMEKLKIAEDKSYEDPTNIQGKYQKYESFEAEVQAKSRVIPELEEIWRVRFTEGHFAHEDTKKHLDELCRLWDLLLELTQEKGILLLRALKFHQYFQECADILEWIADKEAIVTSVELGEDWEHTEILHRKFEEFQGDLTARKRRVDAVNQYANECAEENHPKLTLIKQKQDEVNTAWERLYSLALKRQKTLSDATDFQRFKRDVTEAILWTKEKEPQLTSEDYGKDLVSSEALFHSHKTLKRNLAVMDDKVKELYAKAEKLKLSHPSDAPQIKQMKEDLASSWKNIQALDTNRFAKLQASYGYQRFLSDYDELSGWMKEKTTLINADELPTDVAGGEALLDRHQQHKHEIDSYDDRFQSADETGQALLDVNHEASVEVQEKMTELANQWAALLELWDKRQHQYEQCLDLHLFYRDSEQVDSWMSRQEAFLENEDLGNSLGSVEALLQKHDDFEEAFTAQEEKITTLDKTATKLIDNKHYDSENIASIRDLLLVRRDVLRERAAVRRRLLKESLLLQQMYQDSDDLKNWINKKKKLADDEEYKDIQNLKSQVQKQQAFEEELAANEILLNNLKMTVQKMIEDDHYASDTAAARVSEVASLWEKLLQATAQRGTELEKANKLLQFENNAEDLKHWLMEVKWQATSEDYGKGLADVQNLLRKHGLLESAVAVRQDQVNTLKDLATYFEEIGHPDAVDIQEMRESLVSQFEGLKEPLATRKKKLIDLLLLHQIYRDTEDEEAWIQETEPSAASTYLGKDLIASKNLLNRHQVIQADIASHEPRIQLIMERGNKMVEEGHFAAEDVASKVKSLNENMESLQARAARRQNDLEAIVQFQQYLADLHEAEAWIREKEPIVDNTNYGADEEAAEALLKKHEAFLVDLKAFGNSMKALRDQAEAFQQQQAAPVEGAAREVRVMALYDFQARSNREVTMKKGDVLTLLSSINKDWWKVEADDHQGFVPAVYVRKLAHDEFPMLPQRQREEPGSITQRQEQIEKQYRSLLDRAEERRRRLLQRYNEFLLAYEAGDMLDWIREKKAENTGVDLDDVWELQKKFDEFQTDLKTNEPRLKDINNIADDLLFEGLLTPEGTQIRKELNTRWDSLQRLADEQRQMLGSAHAVQMFHRDADETKEQIEKKCKTLSAADPGSDLFSVQALLRQHEGFERDLAPLGEKVTVLGATAEWLCEAHPDAIDDLNKKRMELNEAWDNLLGCTKDRKENLNEAQKFYLFLSKARDLQNWISGIHGMVSSQELAEDLIGTEILIERHQDHHADMNAKAPTFQDLEDFATELIISGHHASPEIEEKLKAVRIERDDLEKAWEQRKKMLDQCLELQLFQGNCDQAESWMVARENVLRSDDKGFLDSLEALMKKRDDLDTAITTQEKKITELEHFAERLIADDHYAKEEIAAQLQHVLDRWKALKAQLTAERMKLGDYADLKQFYRDLEDLEEWISSMLPIACDESYKDPTNIQRKYLKHQTFENDVYGQAEHVNRVINMGNSLIERRACDGKEEIVKGQLEELQKHWDDLYTRTIDKGEKLNEASRQQRFNTGIRDFEFWLSEAETLLAMKDQARDLASAGNLLKKHQLLETEMLTREDALKDLNQLATDLLSSGTFNVEQIVEKRDNVNDRFLNVQNLAAAHHEKLKEDYALFQFFQDLDNEESWIQDRLSRVSSEDDVKDLPGVQNLMKKHKRLEGELVAHEPAIQNVLDMAEKLGDKAAVGQEEIQKRLAQFVEHWEKLKELAKARGLQLAESLEYLQFKENAKEEEAWIREKEAIVAQGESGDTLAATQSLLKKHEALDNDFAVHETRVQSVCAQGEDILGKVLQEGSHHKEKISAKIYALNEKAPSLAKAIAARKSQLEDEYAFQQFNWKVDVVEAWIAEKEASLKISGNGADLAGFLALLAKQDTLDASLESFQKERLPKITDLKDRLVAAQHSQTEAIEERHAALLRRWEQLLEACKAHRHKLLEKQLPLEEAEKLFMKFAEKASAFNNWCENAEENLSEPVHCVSLNEIRQLQKDHEVFLASLAKAQADFNDLQELDQQMKALNVPSSPYTWLTMEVLEKIWKHLSDIIKEREQELQKEEARQVKNFEMCQEFEQNASAFLQWVSENRAYFLDGSLLKETGTLESKLEANKRKQKEIQAMKRHLMKTGDLGDSLEEAVVLDIKYSTIGLAQQWDQLSQLGMEMQHNLEQQIQAKDTLGVSEETLKEFSTIYQHFDENLTGRLSHKDFRSCLRALNYYLPMVEEDETEPKFEKFLDAVDPGRKGYVSKKDYTSFLVDKESENIKSSNEIENAFEALAEGKAYITKEDMKQALTPEQVSFCASHMQQYVDPRGRSHLSGYDYVGFTNSYFANGEAASSES

SEQ ID NO: 74 - protein, 2331 aa, Equus caballus
MTSATEVENLGNQPPYSRINARWDAPDDELDNDNSSARLFERSRIKALADEREVVQKKTFTKWVNLHLARVPCRITDLYRDLRDGRMLIRLLEVLSGETLPRPTKGKMRIHCLENVDKALQFLKEQRVHLENMGSHDIVDGNHRLVLGLIWTIILRFQIQDIVVQTQEGRETRSAKDALLLWCQMKTADYPQVKVTDFTTSWKDGLAFNALIHKHRPDLIDFDKLKDSNARHNLEHAFDVAEHQLGIIPLLDPEDVFTENPDEKSIITYVVAFYHYFSKMKVLAVEGKRVGKVIDHAMDTEKMIEKYSGLASDLLTWIEQTITVLNSRKFANSLAGVQQQLQAFSTYRTTEKPPKFQEKGNLEVLLFTIQSRMRANNQKVYTPHDGKLVSDINRAWESLEEAEYRRELALRNELIRQEKLEQLARRFDRKAAMRETWLNENQRLVAQDNFGYDLAAVEAAKKKHEAIETDTAAYEERVRALEDLAQELEKENYHDQKRITARKDNILRLWNYLQELLQSRRQRLETTLALQKLFQDMLHSIDWMDDIKAHLLSAEFGKHLLEVEDLLQKHKLMEADIAIQGDKVKAIIAATRQFTEGNGYQPCDPQVIQDRVSHLEQCFAELSNMAAGRKAQLEQSKRLWKFFWEMDEAESWIKEKEQIYSSLDYGKDLTSVLSLQRKHKAFEDELRGLDAHLGQIFQEAEGMVTRKQFGYPQIEARIKEVATQWDQLKELAAFRKKNLQDAENFFQFQGDADELKAWLQDAHRLLSGEDVGQDEGATRALRKKHKDFLEELEESHEVMKHLEQQAQEFPQEFRDSPDVTNRLQALQELYQQVVAQADLRQRRLQDALDLYTVFGETDACQLWMGEKEKWLDQMDIPDTLEDLEVVQHRFDILDQEMKSLMAQIEGVNSAANSLVESGHPRSGEVKKYQDNLNTRWHAFQAMVAERRGKVDSALRVHNYCVDCEETSKWIMDKTKVVESTKDLSRDLAGVIAIQRKLSGLEHDVTAIKARTGALERESLQLMESHPEQRDDIGQRQKYVEELWQGLQRALEGQEASLGEASQLQAFLQDLDNFQSWLSVTQKAVASEDTPESLPEAEQLLQQHAAIKDDIDRHQENFHHIKASGEKVIHGQTDPEYLLLGQRLEGLYSGWDALHRMWDSRGRSLAQCLGFQEFQKDAKQAEAILSNQEYTLAHLEPPDSLEAAEAGIRKFEDFLASMENNRDKVLSPVDSGNILVAEGNLYSDKIKEKVQLIEDRHKKNNEKAQEASDLLRDNLALQNFLQNCQELTLWINDKLLTSPDVSYDEARNLHNKWLKHQAFAAELASHQGWLENIDAEGKELMEEKPQFAALVSQKLEALHQLWDELQTTTQEKAQHLLAARSSDLRSQTHADLNKWISAMEDQLRSDDPGKDLTSVNRMLAKLKRVEDQVNVRKEELGELFAQVPSQGEEVGDMDLSIEKQFLNLLEPLGRRKKQLESSRAKLQISRDIEDETLWVEERLPLAQSVDYGTNLQTVQLFMKKNQTLQNEILGHAPRVEDVLQRGQQLVEAAEIDCQDVAERLQQLQGSWETLQEAAAGRLRRLREASEAQQYYLDAGEAEAWISEQELYVLSEESPEDEEGAIVMLKRHLRQQRAVEEYGRNIKQLAGRAQSLLSAGHPEGEQIIRLQGQVDKQYAGLKDLAEERKRKLENMYHLFQLKREADGLEQWITEKELVASSSEMGQDFDHVTLLRDKFRDFARETGAIGQERVDNMNAFIERLIDAGHSEAATIAEWKDGLNEMWADLLELIDTRMQLLAASYDLHRYFYTGAEILGLIDEKHRELPEDVGLDASTAESFHRVHTAFERELHLLGVQVQQFQDVATHLQTAYAGEKADAIQYKEQEVSAAWQALLEACAGRRTQLVDTADKFRFFSMVRDLFSWMESIIRQIETQERPRDVSSVELLKKYHEGIKAEIETRSKNFSACLELGESLLQRQHQASDEIREKRQQVVSRREEMMEKWKARWERLCLLLEVCQFSRDASVAEAWLIAQEPYLASRDFGHTVDSVEKLIRRHEAFEKSTASWAERFAALEKPTTLELKERQTPPRPAEETGPQEEEGETAGEAPRGPHHAATERTSPGKEERQWPQDLQPPPPPGQQEEGQEEKSGGDERPATEPLFKVLDTPLSEGDEPTTLPAQRDHGHSVQMEGYLGRKHDLEGPNKKASNRSWNNLYCVLRNSELTFYKDAKNLALGVPYHGEEPLALRHAICEIAANYKKKKHVFKLRLSNGSEWLFHGKDEEEMLSWLQGVSTAINESQSIRVKAQSLPLPSLAGPDASLGKKDKEKRFSFFPKKK

SEQ ID NO: 75 - protein, 2364 aa, Equus caballus
MTTTVATDYDNIEIQQQYSDVNNRWDVDDWDNENSSARLFERSRIKALADEREAVQKKTFTKWVNSHLARVSCRITDLYTDLRDGRMLIKLLEVLSGERLPKPTKGRMRIHCLENVDKALQFLKEQRVHLENMGSHDIVDGNHRLTLGLIWTIILRFQIQDISVETEDNKEKKSAKDALLLWCQMKTAGYPNVNIHNFTTSWRDGMAFNALIHKHRPDLIDFDKLKKSNAHYNLQNAFNLAEQHLGLTKLLDPEDISVDHPDEKSIITYVVTYYHYFSKMKALAVEGKRIGKVLDNAIETEKMIEKYESLASDLLEWIEQTIIILNNRKFANSLVGVQQQLQAFNTYRTVEKPPKFTEKGNLEVLLFTIQSKMRANNQKVYMPREGKLISDINKAWERLEKAEHERELALRNELIRQEKLEQLARRFDRKAAMRETWLSENQRLVSQDNFGFDLPAVEAATKKHEAIETDIAAYEERVQAVVAVARELEAENYHDIKRITARKDNVIRLWEYLLELLRARRQRLEMNLGLQKIFQEMLYIMDWMDEMKVLLLSQDYGKHLLGVEDLLQKHALVEADIGIQAERVRGVNASAQKFATDGEGYKPCDPQVIRDRVAHMEFCYQELCQLAAERRARLEESRRLWKFFWEMAEEEGWIREKEKILSSDDYGKDLTSVMRLLSKHRAFEDEMSGRSSHFEQAIKEGEDMITEEHFGSEKIRERIIYIREQWANLEQLSAIRKKRLEEASLLHQFQADADDIDAWMLDILKIVSSNDVGHDEYSTQSLVKKHKDVAEEIANYRPTIDTLHEQASALPQEHAESPDVRGRLSGIEERYKEVAELTRLRKQALQDTLALYKMFSEADACELWIDEKEQWLNNMQIPEKLEDLEVIQHRFESLEPEMNNQASRVAVVNQIARQLMHSGHPSEKEIKAQQDKLNTRWSQFRELVDRKKDALLSALSIQNYHLECNETKSWIREKTKVIESTQDLGNDLAGVMALQRKLTGMERDLVAIEAKLSDLQKEAEKLESEHPDQAQAILSRLAEISDVWEEMKTTLKNREASLGEASKLQQFLRDLDDFQSWLSRTQTAIASEDMPNTLTEAEKLLTQHENIKNEIDNYEEDYQKMRDMGEMVTQGQTDAQYMFLRQRLQALDTGWNELHKMWENRQNLLSQSHAYQQFLRDTKQAEAFLNNQEYVLAHTEMPTTLEGAEAAIKKQEDFMTTMDANEEKINAVVETGRRLVSDGNINSDRIQEKVDSIDDRHRRNREAASELLMRLKDNRDLQKFLQDCQELSLWINEKMLTAQDMSYDEARNLHSKWLKHQAFMAELASNKEWLDKIEKEGMQLISEKPETEAVVKEKLTGLHKMWEVLESTTQTKAQRLFDANKAELFTQSCADLDKWLHGLESQIQSDDYGKDLTSVNILLKKQQMLENQMEVRKKEIEELQSQAQALSQEGKSTDEVDSKRLTVQTKFMELLEPLNERKHNLLASKEIHQFNRDVEDEILWVGERMPLATSRDHGHNLQTVQLLIKKNQTLQKEIQGHQPRIDDIFERSQNIVTDSSSLSAEAIRQRLADLKEQWGCLIEETENRHRRLEEAHRAQQYYFDAAEAEAWMSEQELYMMSEEKAKDEQSAVSMLKKHQILEQAVEDYAETVHQLSKTSRALVADGHPENERISMRQSKVDKLYAGLKDLAEERRGKLDERHRLFQLNREVDDLEQWIAEREVVAGSHELGQDYEHVTMLQERFREFARDTGNIGQERVDTVNHMADELINSGHSDAATIAEWKDGLNEAWADLLELIDTRTQILAASYELHKFYHDAKEIFGRIQDKHKKLPEELGRDQNTVETLQRMHTTFEHDIQALGTQVRQLQEDAARLQAAYAGDKADDIQKRENEVLEAWKALLDACEGRRVRLVDTGDKFRFFSMVRDLMLWMEDVIRQIEAQEKPRDVSSVELLMNNHQGIKAEIDARNDSFTTCIELGKSLLARKHYASEEIKEKLLQLTEKRKEMIDKWEDRWEWLRLILEVHQFSRDASVAEAWLLGQEPYLSSREIGQSVDEVEKLIKRHEAFEKSAATWDERFSALERLTTLELLEVRRQQEEEERKRRPPSPEPSTRASEEAESQQQWDTSKGEQVSQNGLPAEQGSPRMAETADTSEMVNGAAEQRTSSKESSPIPSPTSDRKAKTALPPQSAATLPARAQETPSAQMEGFLNRKHEWEAHNKKASSRSWHNVYCVINNQEMGFYKDAKTAASGIPYHSEVPVSLKEAVCEVALDYKKKKHVFKLRLNDGNEYLFQAKDDEEMNTWIQAISSAISSDKYEVSASTQSTPASSRAQTLPTSVVTITSESSPGKREKDKEKDKEKRFSIFGKKK

SEQ ID NO: 76 - protein, 317 aa, Homo sapiens
MGYDVTRFQGDVDEDLICPICSGVLEEPVQAPHCEHAFCNACITQWFSQQQTCPVDRSVVTVAHLRPVPRIMRNMLSKLQIACDNAVFGCSAVVRLDNLMSHLSDCEHNPKRPVTCEQGCGLEMPKDELPNHNCIKHLRSVVQQQQTRIAELEKTSAEHKHQLAEQKRDIQLLKAYMRAIRSVNPNLQNLEETIEYNEILEWVNSLQPARVTRWGGMISTPDAVLQAVIKRSLVESGCPASIVNELIENAHERSWPQGLATLETRQMNRRYYENYVAKRIPGKQAVVVMACENQHMGDDMVQEPGLVMIFAHGVEEI

SEQ ID NO: 77 - protein, 246 aa, Homo sapiens
MRNMLSKLQIACDNAVFGCSAVVRLDNLMSHLSDCEHNPKRPVTCEQGCGLEMPKDELPNHNCIKHLRSVVQQQQTRIAELEKTSAEHKHQLAEQKRDIQLLKAYMRAIRSVNPNLQNLEETIEYNEILEWVNSLQPARVTRWGGMISTPDAVLQAVIKRSLVESGCPASIVNELIENAHERSWPQGLATLETRQMNRRYYENYVAKRIPGKQAVVVMACENQHMGDDMVQEPGLVMIFAHGVEEI

SEQ ID NO: 78 - protein, 317 aa, Mus musculus
MGYDVTRFQGDVDEDLICPICSGVLEEPVQAPHCEHAFCNACITQWFSQQQTCPVDRSVVTVAHLRPVPRIMRNMLSKLQIACDNAVFGCSAVVRLDNLMSHLSDCEHNPKRPVTCEQGCGLEMPKDELPNHNCIKHLRSVVQQQQSRIAELEKTSAEHKHQLAEQKRDIQLLKAYMRAIRSVNPNLQNLEETIEYNEILEWVNSLQPARVTRWGGMISTPDAVLQAVIKRSLVESGCPASIVNELIENAHERSWPQGLATLETRQMNRRYYENYVAKRIPGKQAVVVMACENQHMGDDMVQEPGLVMIFAHGVEEI

SEQ ID NO: 79 - protein, 246 aa, Pan troglodytes; identical to SEQ ID NO: 77

SEQ ID NO: 80 - protein, 317 aa, Pan troglodytes; identical to SEQ ID NO: 76

SEQ ID NO: 81 - DNA, 7260 bp, Homo sapiens
atggagcaatttccaaaggaaaccgttgtggagagcagtgggccaaaggttttggaaacagcagaagagatccaggagaggcgtcaggaagtgttgactcggtatcaaagtttcaaggagcgggtcgctgagaggggtcagaagcttgaggattcctatcacttacaagttttcaagcgagatgcagatgatctggggaagtggatcatggagaaagtcaatatcttaaccgataagagctatgaagacccaactaatatacaggggaaatatcagaagcatcaatcccttgaagcagaggtgcaaacaaaatcaagactcatgtctgaactggaaaaaacaagggaagaacgatttaccatgggtcattctgcccacgaagaaacgaaggcccatatagaggagctacgccacctgtgggacctgctgttagagctgaccctggagaagggtgaccagttgctgcgggccctgaagttccagcagtatgtacaggagtgtgctgacatcttagagtggattggagacaaggaggctatagcgacatcagtggagctaggtgaagactgggagcgcaccgaagttctgcataagaaatttgaagacttccaagtggagctggtagctaaagaagggagagttgttgaagtgaaccaatatgccaatgagtgtgccgaggaaaaccatcctgacctacccttaattcagtctaagcaaaatgaggtgaatgctgcctgggagcgccttcgtggtttggctctccagagacagaaagctctgtccaatgctgcaaacttacaacgattcaaaagggatgtgactgaagccatccagtggatcaaggagaaggaacctgtactcacctctgaggactatggcaaagaccttgttgcctctgaaggactgtttcacagtcacaagggacttgagagaaatcttgctgtcatgagtgacaaggtgaaggagttatgtgctaaagcagagaagctgacactttcccatccttcagatgcacctcagatccaggagatgaaagaagatctggtctccagctgggagcatattcgtgccctggccaccagcagatatgaaaaactgcaggctacttattggtaccatcgattttcatctgactttgatgaactctcaggctggatgaacgagaagactgctgcgatcaatgctgatgagctgccaacagatgtggctggtggagaagttctgctggacaggcatcagcagcataagcatgagattgactcttacgatgaccgatttcaatctgctgatgagactggtcaagacctcgtgaatgccaatcatgaagcctctgatgaagttcgggaaaagatggaaatacttgacaacaactggactgccctgctggaactgtgggacgagcgtcatcgtcagtatgagcagtgcttggactttcatctcttctacagagacagtgagcaagtggacagttggatgagtagacaagaggccttcctggaaaacgaggatctgggaaactcactgggcagtgcagaagcccttcttcagaagcatgaagactttgaggaagcctttactgcccaggaagagaagatcataactgtagacaagactgcaaccaaattgattggtgatgaccattatgattcagagaacatcaaggctatccgtgacgggctgttagcccggcgggatgccctacgtgaaaaggctgccactagacgtagattgctgaaggagtcattgcttctgcaaaaactgtatgaggactcagatgacctaaagaactggatcaacaagaagaaaaagttggcagatgatgaagattacaaggacatacagaacttgaagagcagggttcaaaagcagcaagtctttgaaaaggagttggcagttaataagacccagctggaaaacatacagaaaactggccaagagatgattgagggtggtcactatgcctctgacaatgtgaccactcgtctgagtgaagttgccagcctctgggaggagttgctggaggctacaaaacagaaagggacccagttgcatgaggccaaccagcagctgcaatttgaaaataatgcagaagatttgcagcgctggctggaggatgttgagtggcaagtcacctctgaggattatgggaaaggcctggccgaggtacagaatcgactcaggaaacacggcctcctggagtcggctgtggctgctcgtcaggatcaggtggatatccttacagacctggctgcatattttgaagaaataggccatcctgattctaaggatataagggcaaggcaagagtccttggtatgccgatttgaagctctgaaagagccactggccacccgaaagaagaagctcttagaccttctccatctgcagctgatttgtagagacacagaggatgaggaggcctggatccaagagactgaaccctcagctacttccacctaccttggaaaggacctgattgcttccaaaaagcttctgaataggcatagagtcatcctggagaacattgccagccatgaaccacgcattcaagagataacagaaaggggaaacaaaatggtagaggaaggacactttgctgcagaagatgtggcctctagggtcaagagtttgaaccagaatatggagtctctccgtgctcgagctgctaggcgacaaaatgatcttgaagccaatgtccagttccagcagtacctggctgacctgcatgaagcagaaacatggatcagagagaaggaacctattgtagataatactaactatggtgctgatgaagaagcagctggggctcttctaaagaagcatgaggcctttctattagatctcaattcatttggagacagtatgaaagctctgcggaatcaggcaaacgcctgccagcaacaacaggctgcaccagtggagggagttgctggagaacaaagggtcatggctttatatgacttccaggcccgcagcccccgagaagtcaccatgaagaaaggtgatgtcttaacgctgctcagttccatcaataaggactggtggaaggtggaagctgctgatcatcagggcattgtcccagctgtctatgtcagaagactggcccacgatgagttcccgatgctcccacagcggcgacgagaagagccaggaaacatcacccagcgccaggagcagattgagaaccaataccgctccctcttggatcgggcagaagaacgcagacgtcgtctattgcaacgttataatgaatttttattggcctatgaggcaggagacatgctggaatggattcaagagaaaaaggcagaaaacactggagtggaactagatgatgtttgggagctgcagaaaaagtttgatgagttccaaaaggatttgaataccaatgagcctcggctaagggatatcaacaaggtagctgatgatctactatttgaaggacttctaacaccagaaggagctcaaatccggcaggaattgaattcccgctggggttctttgcagaggcttgcagatgaacagcggcagctgctgggcagtgcccatgctgttgaagtgtttcacagagaagcagatgacacgaaggagcagattgagaagaaatgccaggccctcagtgctgcagaccctggctcagatctgttcagtgttcaggctcttcagcgacggcatgagggctttgaaagggacctcgtacccctgggagataaggtgaccatactgggggagacagcagagcggctcagtgagtcccatccagatgccactgaggacctgcagagacagaaaatggagctgaatgaggcctgggaagacctgcaggggcgtacaaaggatcgtaaggagagcctaaatgaggcccagaaattctacctgttcctcagcaaggccagggatctgcagaactggatcagtagcattggtggcatggtatcatcacaggagctggccgaagacttaactggcatagagatcttgctggagagacatcaggagcaccgtgctgacatggaggcagaggctcccaccttccaggccttagaggacttcagtgcagaacttatcgacagtgggcaccatgctagccctgaaattgaaaaaaagcttcaagctgtcaagctagagagagatgatttggagaaggcttgggaaaaacgcaagaagatcctagaccagtgcctggagttgcagatgttccaggggaactgtgatcaagttgagagctggatggtggcacgtgagaattccctgaggtcagatgacaaaagttccttagacagtctggaggctttgatgaagaaacgggacgatttggacaaagcaatcactgcccaggaagggaagatcactgacctagaacattttgctgagagcctcattgctgatgaacactatgccaaagaagagattgctacgcggctccaacgtgtactagacaggtggaaggctctcaaagcacaactgattgatgagcggacaaagcttggagactatgccaacctaaaacaattctaccgagaccttgaggagctggaagaatggatcagtgagatgctgcccacagcctgtgatgaatcctacaaagacgccactaacattcagaggaaatacctgaaacaccagacctttgcacatgaagtcgatggccgatctgagcaggtgcatggcgtcatcaacctggggaactccctgattgagtgtagcgcttgtgatggcaatgaagaggccatgaaggagcaactggaacagctgaaggaacattgggatcatctgcttgagagaacaaatgacaaagggaagaagctcaatgaggccagtcgtcaacagaggttcaacacaagcatccgggactttgagttctggctctcagaggcagagacattgctggccatgaaagatcaggccagggacttggcttcagcaggaaacctactcaagaagcatcagctattggagagagagatgttggctcgagaggatgcactcaaggacctgaatacattggctgaagatttgctctccagcgggactttcaacgttgatcagattgtgaagaaaaaagataatgtcaacaagcgtttcctgaatgtccaagaattggcagctgcacaccacgaaaaattgaaagaggcctatgccttgttccagttcttccaggatctagatgatgaggaatcctggatagaggagaagttgatacgagtgagctcccaggactatgggagagatcttcagggggttcagaacttgctgaagaagcacaaacgcctagagggggagctggtggcccatgagcctgccatccagaatgtgctggatatggcagagaagctgaaagacaaggctgctgtggggcaagaggagatccagttgcggctggctcagtttgttgaacactgggagaagctcaaagagttggccaaggcccgaggacttaagttggaagaatccctagaatacttgcaattcatgcagaatgctgaggaagaggaagcttggatcaatgaaaagaatgctttggctgtccgaggagattgtggagatacattagctgctactcagagcttgctaatgaagcatgaagctttggaaaatgactttgctgtccatgagacccgagtacaaaatgtgtgtgcacaaggagaagacatcctaaataaggtgttgcaggaggaaagtcagaacaaagagatttcttccaagatagaggctctgaatgaaaagaccccttctctggctaaggcaatagctgcttggaagttgcaattggaagacgattatgcctttcaggaattcaactggaaggctgatgtggtagaggcttggatagctgataaggaaacaagcctaaagaccaatggcaatggtgcagaccttggtgacttcctcactcttctggcaaaacaggacactctggatgccagtctgcagagtttccagcaagagagacttcccgagatcactgacctgaaggacaaactgatttctgctcaacacaaccagtctaaagccattgaagagcgttatgccgctctgctgaagcgctgggaacagttgctggaagcctcggcagtccacagacagaaattgctggagaaacagctgcctctacagaaggctgaggacctgttcgtggaatttgcacataaggcttcagctttgaacaactggtgtgaaaagatggaagaaaacttgtcagagcctgtgcactgtgtctccctgaatgaaattcggcagctgcagaaagaccatgaggacttcttggcctccctggctagggctcaagcagactttaaatgtttgctggagctagaccagcagattaaggccttaggtgtgccttccagcccttatacctggttaacagtggaggtgctggaaaggacctggaagcacctatctgacatcattgaggaacgggagcaggagctgcaaaaggaagaggcaagacaggtcaagaactttgagatgtgtcaggagtttgaacagaatgccagtaccttccttcaatggatcctggaaaccagggcttactttctggatggatcattgctcaaagaaacaggaactctggaatctcagctggaagcaaataaaagaaaacagaaggagatccaggcgatgaagcgtcaactaaccaagattgtggacctgggggacaacttggaagacgctctgatccttgatatcaaatacagcaccattggattggctcagcagtgggaccagctctaccagcttgggttgcggatgcaacacaacctggagcaacagatccaggccaaggacatcaaaggtgtgagtgaagagactctaaaggaatttagcacaatctataaacactttgatgagaatttgacagggcgcctgactcacaaagagttccggtcctgcctgagaggactcaattactacttgcccatggtggaggaggatgaacatgagcccaagtttgagaagttcctggatgctgtggatccagggaggaagggctatgtctcactggaggactatactgctttcctgattgacaaggagtcagaaaacatcaagtccagtgatgaaatagagaatgccttccaagccctggcagagggcaagtcatatattaccaaagaagacatgaagcaggcccttaccccagagcaagtgtcattctgtgccacacatatgcagcaatatatggacccacggggtcgaagccatctctctggctatgactacgttggcttcaccaattcctactttggcaactaa

SEQ ID NO: 82 - DNA, 7434 bp, Homo sapiens
atggacccaagtggggtcaaagtgctggaaacagcagaggacatccaggagaggcggcagcaggtcctagaccgataccaccgcttcaaggaactctcaacccttaggcgtcagaagctggaagattcctatcgattccagttctttcaaagagatgctgaagagctggagaaatggatacaggaaaaacttcagattgcatctgatgagaattataaagacccaaccaacttgcagggaaagcttcagaagcatcaagcatttgaagctgaagtgcaggccaactcaggagccattgttaagctggatgaaactggaaacctgatgatctcagaagggcattttgcatctgaaaccatacggacccgtttgatggagctgcaccgccagtgggaattacttttggagaagatgcgagaaaaaggaatcaaactgctgcaggcccagaagttggtgcagtacttacgagaatgtgaggacgtgatggactggatcaatgacaaggaagcaattgttacttctgaagagctgggccaggatctggagcatgtagaggttttacagaagaaatttgaagagtttcaaacagatatggctgctcatgaagaaagagttaatgaagtgaaccagtttgctgccaaactcatacaggagcagcaccctgaggaggaactgatcaagactaagcaggatgaagtcaatgcagcctggcagcggctgaagggcctggctctgcagaggcaggggaagctctttggggcagcagaagttcagcgctttaacagggatgtggatgagactatcagttggattaaggaaaaggagcagttaatggcctctgatgattttggccgagacctggcaagtgttcaggctctgcttcggaagcacgagggtctggagagagatcttgctgctctagaagacaaggtcaaagccctgtgtgctgaggctgaccgcctgcaacagtcccaccctctgagtgcaacacagattcaagtgaagcgagaggaactgattacaaactgggagcagatccgcaccttggcggcagagagacatgcacggctcaatgattcatacaggcttcaacgcttccttgctgacttccgtgacctcaccagctgggtgactgagatgaaagccctcatcaatgcagatgagcttgccagtgatgtggctggggctgaagccctgctagatagacaccaagagcacaagggtgaaattgatgcccatgaagacagcttcaaatctgcagatgaatctggacaggcactgcttgctgctggtcactatgcctcagatgaagtgagggagaagctgaccgtcctttccgaggagagagcggcgctgctggagctgtgggagctgcgcaggcagcagtacgagcagtgcatggacctgcagctcttctaccgggacactgagcaggtggacaactggatgagcaagcaggaggcgttcctgttgaatgaagacttgggagattccttggatagtgtggaagcgcttcttaagaagcacgaagactttgagaaatcccttagtgcccaggaggaaaagattacagcattagatgaatttgcaaccaagctaattcagaacaaccactatgcaatggaagatgtggccactcgccgagatgctctgttgagccgccgcaatgcccttcacgagagagccatgcgtcgccgggcccagctagccgattctttccatctgcagcagtttttccgtgattctgatgagctcaagagttgggtcaatgagaagatgaaaactgccacagatgaagcttataaagatccatccaacctacaaggaaaagtacagaagcatcaggcttttgaggctgagctctcagcaaaccagagccgaattgatgccttggagaaagctggccaaaagctgattgatgtcaaccactatgccaaggatgaagtggcagctcgtatgaatgaggtgatcagtttgtggaagaaactgctagaggccactgaactgaaaggaataaagcttcgtgaagccaaccagcaacagcaatttaatcgcaatgttgaggatattgaattgtggctatatgaagtagaaggtcacttggcttcggatgattacggcaaagatcttaccaatgtgcagaacctccagaagaaacatgccctgctagaggcagatgtggctgctcaccaggaccgaattgatggcatcaccattcaggcccgccagttccaagatgctggccattttgatgcagaaaacatcaagaagaaacaggaagccctcgtggctcgctatgaggcactcaaggagcccatggttgcccggaagcagaagctggccgattctctgcggttgcagcagctcttccgggatgttgaggatgaggagacgtggattcgagagaaagagcccattgccgcatctaccaacagaggtaaggatttaattggggtccagaatctgctaaagaaacatcaagccttacaagcagaaattgctggacatgaaccacgcatcaaagcagttacacagaaggggaatgccatggtggaggaaggccattttgctgcagaggatgtgaaggccaagcttcacgagctgaaccaaaagtgggaggcactgaaagccaaagcttcccagcgtcggcaggacctggaggactctctgcaggcccagcagtactttgctgatgctaacgaggctgaatcctggatgcgggagaaggaacccattgtgggcagcactgactatggcaaggacgaagactctgctgaggctctactgaagaaacacgaagctttgatgtcagatctcagtgcctacggcagcagcatccaggctttgcgagaacaagcacagtcctgccggcaacaagtggcccccacggatgatgagactgggaaggagctggtcttggctctctacgactatcaggagaagagtccccgagaggtcaccatgaagaagggagatatccttaccttactcaacagcaccaacaaggattggtggaaagtggaagtgaacgatcgtcagggttttgtgccggctgcgtacgtgaagaaattggaccccgcccagtcagcctcccgggagaatctcctggaggagcaaggcagcatagcactgcggcaggagcagattgacaatcagacacgcataactaaggaggccggcagtgtatctctgcgtatgaagcaggtggaagaactatatcattctctgctggaactgggtgagaagcgtaaaggcatgttggagaagagttgcaagaagtttatgttgttccgtgaagcgaatgaactacagcaatggatcaatgagaaggaagccgctctgacaagtgaggaggtcggagcagacttggagcaggttgaggtgctccagaagaagtttgatgacttccagaaggacctgaaggccaatgagtcacggttgaaggacattaacaaggtagctgaagacctggagtctgaaggtctcatggcagaggaggtgcaggctgtgcaacaacaggaagtgtatggcatgatgcccagggatgaaactgattccaagacagcctccccgtggaagtctgctcgtctgatggttcacaccgtggccacctttaattccatcaaggagctgaatgagcgctggcggtccctacagcagctggccgaggaacggagccagctcttgggcagcgcccatgaagtacagaggttccacagagatgctgatgaaaccaaagaatggattgaagagaagaatcaagctctaaacacagacaattatggacatgatctcgccagtgtccaggccctgcaacgcaagcatgagggcttcgagagggaccttgcggctctcggtgacaaggtaaactcccttggtgaaacagcagagcgcctgatccagtcccatcccgagtcagcagaagacctgcaggaaaagtgcacagagttaaaccaggcctggagcagcctggggaaacgtgcagatcagcgcaaggcaaagttgggtgactcccacgacctgcagcgcttccttagcgatttccgggacctcatgtcttggatcaatggaatacgggggttggtgtcctcagatgagctagccaaggatgtcaccggagctgaggcattgctggagcgacaccaggaacaccggacagaaatcgatgccagggctggcactttccaggcatttgagcagtttggacagcagctgttggctcacggacactatgccagccctgagatcaagcagaaacttgatattcttgaccaggagcgtgcagacctggagaaggcctgggttcagcgcaggatgatgctggatcagtgccttgaactgcagctgttccatcgggactgtgagcaagctgagaactggatggctgcccgggaggccttcttgaataccgaagacaaaggagactcactggacagcgtagaggctctgatcaaaaaacatgaagactttgacaaagcgattaacgtccaggaagagaagattgctgctctgcaggcctttgccgaccagctcatcgctgccggccattatgccaagggagacatttctagccggcgcaatgaggtcttggacaggtggcgacgtctgaaagcccagatgattgagaaaaggtcaaagctaggagaatctcaaaccctccaacagttcagccgggatgtggatgagattgaggcttggatcagtgaaaaattgcaaacagcgagtgatgagtcgtacaaggatcccaccaacatccagctttccaagctgctgagcaagcaccagaagcaccaggcttttgaagcagagctgcatgccaacgctgaccggatccgtggggttatcgacatgggcaactccctcattgaacgtggagcctgtgccggcagtgaggatgctgtcaaggcccgcctggctgccttagctgaccagtggcagttcttggtgcaaaagtcagcggaaaagagccagaaactgaaagaagccaacaagcagcagaacttcaacacagggatcaaggactttgacttctggctgtctgaggtggaggccctgctggcatccgaagattatggcaaagacctggcttctgtgaacaacctgctgaaaaagcatcaactgctggaagcagatatatctgcccatgaggatcgcctgaaggacctgaacagccaggcagacagcctgatgaccagcagtgccttcgacacctcccaagtaaaggacaagagggacaccatcaacgggcgcttccagaagatcaagagcatggcggcctcccggcgagccaagctgaatgaatcccatcgcctgcaccagttcttccgggacatggatgacgaggagtcctggatcaaggagaagaagctgctggtgggctcagaggactacggccgggacctaaccggcgtgcagaacctgaggaagaagcacaagcggctggaagcagaactggctgcgcatgagccggctattcagggtgtcctggacactggcaagaagctgtccgatgacaacaccatcgggaaagaggagatccagcagcggctggcgcagtttgtggagcactggaaagagctgaagcagctggcagctgcccggggtcagcggctggaagagtccttggaatatcagcagtttgtagccaatgtggaagaggaagaagcctggatcaatgagaaaatgaccctggtggccagcgaagattatggcgacactcttgccgccatccagggcttactgaagaaacatgaagcttttgagacagacttcaccgtccacaaggatcgcgtgaatgatgtctgcaccaatggacaagacctcattaagaagaacaatcaccatgaggagaacatctcttcaaagatgaagggcctgaacgggaaagtgtcagacctggagaaagctgcagcccagagaaaggcgaagctggatgagaactcggccttccttcagttcaactggaaggcggacgtggtggagtcctggatcggtgaaaaggagaacagcttgaagacagatgattatggccgagacctgtcttctgtgcagacgctcctcaccaaacaggaaacttttgacgctgggctgcaggccttccagcaggaaggcattgccaacatcactgccctcaaagatcagcttctcgccgccaaacacgttcagtccaaggccatcgaggcccggcacgcctccctcatgaagaggtggagccagcttctggccaactcagccgcccgcaagaagaagcttctggaggctcagagtcacttccgcaaggtggaggacctcttcctgaccttcgccaaaaaggcttctgccttcaacagctggtttgaaaatgcagaggaggacttaacagaccccgtgcgctgcaactccttggaagaaatcaaagctttgcgcgaggcccacgacgccttccgctcctccctcagctctgcccaggctgacttcaaccagctggccgagctggaccgccagatcaagagcttccgcgtagcctccaacccctacacctggtttaccatggaggccctggaggagacctggaggaacctacagaaaatcatcaaggagagggagctggagctgcagaaggaacagcggcggcaggaggagaacgacaagctgcgccaggagtttgcccagcacgccaacgccttccaccagtggatccaagagaccaggacatacctcctcgatgggtcctgtatggtggaagagtcggggaccctcgaatcccagcttgaagctaccaaacgcaagcaccaggaaatccgagccatgagaagtcagctcaaaaagatcgaggacctgggggccgccatggaggaggccctcatcctggacaacaagtacacggagcacagcaccgtgggcctcgcccagcagtgggaccagctggaccagctgggcatgcgcatgcagcacaacctggagcagcagatccaggccaggaacacaacaggtgtgactgaggaggccctcaaagaattcagcatgatgtttaaacactttgacaaggacaagtctggcaggctgaaccatcaggagttcaaatcttgcctgcgctccctgggctatgacctgcccatggtggaggaaggggaacctgaccctgagttcgaggcaatcctggacacggtggatccgaacagagatggccatgtctccttgcaagaatacatggctttcatgatcagccgcgaaactgagaacgtcaagtccagcgaggagattgagagcgccttccgggccctcagctcagagggaaagccttacgtgaccaaggaggagctctaccagaacctgacccgggaacaagccgactactgcgtctcccacatgaagccctacgtggacggcaagggccgcgagctccccaccgcgttcgactacgtggagttcacccgctcgcttttcgtgaactga

SEQ ID NO: 83 - DNA, 7419 bp, Homo sapiens
atggacccaagtggggtcaaagtgctggaaacagcagaggacatccaggagaggcggcagcaggtcctagaccgataccaccgcttcaaggaactctcaacccttaggcgtcagaagctggaagattcctatcgattccagttctttcaaagagatgctgaagagctggagaaatggatacaggaaaaacttcagattgcatctgatgagaattataaagacccaaccaacttgcagggaaagcttcagaagcatcaagcatttgaagctgaagtgcaggccaactcaggagccattgttaagctggatgaaactggaaacctgatgatctcagaagggcattttgcatctgaaaccatacggacccgtttgatggagctgcaccgccagtgggaattacttttggagaagatgcgagaaaaaggaatcaaactgctgcaggcccagaagttggtgcagtacttacgagaatgtgaggacgtgatggactggatcaatgacaaggaagcaattgttacttctgaagagctgggccaggatctggagcatgtagaggttttacagaagaaatttgaagagtttcaaacagatatggctgctcatgaagaaagagttaatgaagtgaaccagtttgctgccaaactcatacaggagcagcaccctgaggaggaactgatcaagactaagcaggatgaagtcaatgcagcctggcagcggctgaagggcctggctctgcagaggcaggggaagctctttggggcagcagaagttcagcgctttaacagggatgtggatgagactatcagttggattaaggaaaaggagcagttaatggcctctgatgattttggccgagacctggcaagtgttcaggctctgcttcggaagcacgagggtctggagagagatcttgctgctctagaagacaaggtcaaagccctgtgtgctgaggctgaccgcctgcaacagtcccaccctctgagtgcaacacagattcaagtgaagcgagaggaactgattacaaactgggagcagatccgcaccttggcggcagagagacatgcacggctcaatgattcatacaggcttcaacgcttccttgctgacttccgtgacctcaccagctgggtgactgagatgaaagccctcatcaatgcagatgagcttgccagtgatgtggctggggctgaagccctgctagatagacaccaagagcacaagggtgaaattgatgcccatgaagacagcttcaaatctgcagatgaatctggacaggcactgcttgctgctggtcactatgcctcagatgaagtgagggagaagctgaccgtcctttccgaggagagagcggcgctgctggagctgtgggagctgcgcaggcagcagtacgagcagtgcatggacctgcagctcttctaccgggacactgagcaggtggacaactggatgagcaagcaggaggcgttcctgttgaatgaagacttgggagattccttggatagtgtggaagcgcttcttaagaagcacgaagactttgagaaatcccttagtgcccaggaggaaaagattacagcattagatgaatttgcaaccaagctaattcagaacaaccactatgcaatggaagatgtggccactcgccgagatgctctgttgagccgccgcaatgcccttcacgagagagccatgcgtcgccgggcccagctagccgattctttccatctgcagcagtttttccgtgattctgatgagctcaagagttgggtcaatgagaagatgaaaactgccacagatgaagcttataaagatccatccaacctacaaggaaaagtacagaagcatcaggcttttgaggctgagctctcagcaaaccagagccgaattgatgccttggagaaagctggccaaaagctgattgatgtcaaccactatgccaaggatgaagtggcagctcgtatgaatgaggtgatcagtttgtggaagaaactgctagaggccactgaactgaaaggaataaagcttcgtgaagccaaccagcaacagcaatttaatcgcaatgttgaggatattgaattgtggctatatgaagtagaaggtcacttggcttcggatgattacggcaaagatcttaccaatgtgcagaacctccagaagaaacatgccctgctagaggcagatgtggctgctcaccaggaccgaattgatggcatcaccattcaggcccgccagttccaagatgctggccattttgatgcagaaaacatcaagaagaaacaggaagccctcgtggctcgctatgaggcactcaaggagcccatggttgcccggaagcagaagctggccgattctctgcggttgcagcagctcttccgggatgttgaggatgaggagacgtggattcgagagaaagagcccattgccgcatctaccaacagaggtaaggatttaattggggtccagaatctgctaaagaaacatcaagccttacaagcagaaattgctggacatgaaccacgcatcaaagcagttacacagaaggggaatgccatggtggaggaaggccattttgctgcagaggatgtgaaggccaagcttcacgagctgaaccaaaagtgggaggcactgaaagccaaagcttcccagcgtcggcaggacctggaggactctctgcaggcccagcagtactttgctgatgctaacgaggctgaatcctggatgcgggagaaggaacccattgtgggcagcactgactatggcaaggacgaagactctgctgaggctctactgaagaaacacgaagctttgatgtcagatctcagtgcctacggcagcagcatccaggctttgcgagaacaagcacagtcctgccggcaacaagtggcccccacggatgatgagactgggaaggagctggtcttggctctctacgactatcaggagaagagtccccgagaggtcaccatgaagaagggagatatccttaccttactcaacagcaccaacaaggattggtggaaagtggaagtgaacgatcgtcagggttttgtgccggctgcgtacgtgaagaaattggaccccgcccagtcagcctcccgggagaatctcctggaggagcaaggcagcatagcactgcggcaggagcagattgacaatcagacacgcataactaaggaggccggcagtgtatctctgcgtatgaagcaggtggaagaactatatcattctctgctggaactgggtgagaagcgtaaaggcatgttggagaagagttgcaagaagtttatgttgttccgtgaagcgaatgaactacagcaatggatcaatgagaaggaagccgctctgacaagtgaggaggtcggagcagacttggagcaggttgaggtgctccagaagaagtttgatgacttccagaaggacctgaaggccaatgagtcacggttgaaggacattaacaaggtagctgaagacctggagtctgaaggtctcatggcagaggaggtgcaggctgtgcaacaacaggaagtgtatggcatgatgcccagggatgaaactgattccaagacagcctccccgtggaagtctgctcgtctgatggttcacaccgtggccacctttaattccatcaaggagctgaatgagcgctggcggtccctacagcagctggccgaggaacggagccagctcttgggcagcgcccatgaagtacagaggttccacagagatgctgatgaaaccaaagaatggattgaagagaagaatcaagctctaaacacagacaattatggacatgatctcgccagtgtccaggccctgcaacgcaagcatgagggcttcgagagggaccttgcggctctcggtgacaaggtaaactcccttggtgaaacagcagagcgcctgatccagtcccatcccgagtcagcagaagacctgcaggaaaagtgcacagagttaaaccaggcctggagcagcctggggaaacgtgcagatcagcgcaaggcaaagttgggtgactcccacgacctgcagcgcttccttagcgatttccgggacctcatgtcttggatcaatggaatacgggggttggtgtcctcagatgagctagccaaggatgtcaccggagctgaggcattgctggagcgacaccaggaacaccggacagaaatcgatgccagggctggcactttccaggcatttgagcagtttggacagcagctgttggctcacggacactatgccagccctgagatcaagcagaaacttgatattcttgaccaggagcgtgcagacctggagaaggcctgggttcagcgcaggatgatgctggatcagtgccttgaactgcagctgttccatcgggactgtgagcaagctgagaactggatggctgcccgggaggccttcttgaataccgaagacaaaggagactcactggacagcgtagaggctctgatcaaaaaacatgaagactttgacaaagcgattaacgtccaggaagagaagattgctgctctgcaggcctttgccgaccagctcatcgctgccggccattatgccaagggagacatttctagccggcgcaatgaggtcttggacaggtggcgacgtctgaaagcccagatgattgagaaaaggtcaaagctaggagaatctcaaaccctccaacagttcagccgggatgtggatgagattgaggcttggatcagtgaaaaattgcaaacagcgagtgatgagtcgtacaaggatcccaccaacatccagagcaagcaccagaagcaccaggcttttgaagcagagctgcatgccaacgctgaccggatccgtggggttatcgacatgggcaactccctcattgaacgtggagcctgtgccggcagtgaggatgctgtcaaggcccgcctggctgccttagctgaccagtggcagttcttggtgcaaaagtcagcggaaaagagccagaaactgaaagaagccaacaagcagcagaacttcaacacagggatcaaggactttgacttctggctgtctgaggtggaggccctgctggcatccgaagattatggcaaagacctggcttctgtgaacaacctgctgaaaaagcatcaactgctggaagcagatatatctgcccatgaggatcgcctgaaggacctgaacagccaggcagacagcctgatgaccagcagtgccttcgacacctcccaagtaaaggacaagagggacaccatcaacgggcgcttccagaagatcaagagcatggcggcctcccggcgagccaagctgaatgaatcccatcgcctgcaccagttcttccgggacatggatgacgaggagtcctggatcaaggagaagaagctgctggtgggctcagaggactacggccgggacctaaccggcgtgcagaacctgaggaagaagcacaagcggctggaagcagaactggctgcgcatgagccggctattcagggtgtcctggacactggcaagaagctgtccgatgacaacaccatcgggaaagaggagatccagcagcggctggcgcagtttgtggagcactggaaagagctgaagcagctggcagctgcccggggtcagcggctggaagagtccttggaatatcagcagtttgtagccaatgtggaagaggaagaagcctggatcaatgagaaaatgaccctggtggccagcgaagattatggcgacactcttgccgccatccagggcttactgaagaaacatgaagcttttgagacagacttcaccgtccacaaggatcgcgtgaatgatgtctgcaccaatggacaagacctcattaagaagaacaatcaccatgaggagaacatctcttcaaagatgaagggcctgaacgggaaagtgtcagacctggagaaagctgcagcccagagaaaggcgaagctggatgagaactcggccttccttcagttcaactggaaggcggacgtggtggagtcctggatcggtgaaaaggagaacagcttgaagacagatgattatggccgagacctgtcttctgtgcagacgctcctcaccaaacaggaaacttttgacgctgggctgcaggccttccagcaggaaggcattgccaacatcactgccctcaaagatcagcttctcgccgccaaacacgttcagtccaaggccatcgaggcccggcacgcctccctcatgaagaggtggagccagcttctggccaactcagccgcccgcaagaagaagcttctggaggctcagagtcacttccgcaaggtggaggacctcttcctgaccttcgccaaaaaggcttctgccttcaacagctggtttgaaaatgcagaggaggacttaacagaccccgtgcgctgcaactccttggaagaaatcaaagctttgcgcgaggcccacgacgccttccgctcctccctcagctctgcccaggctgacttcaaccagctggccgagctggaccgccagatcaagagcttccgcgtagcctccaacccctacacctggtttaccatggaggccctggaggagacctggaggaacctacagaaaatcatcaaggagagggagctggagctgcagaaggaacagcggcggcaggaggagaacgacaagctgcgccaggagtttgcccagcacgccaacgccttccaccagtggatccaagagaccaggacatacctcctcgatgggtcctgtatggtggaagagtcggggaccctcgaatcccagcttgaagctaccaaacgcaagcaccaggaaatccgagccatgagaagtcagctcaaaaagatcgaggacctgggggccgccatggaggaggccctcatcctggacaacaagtacacggagcacagcaccgtgggcctcgcccagcagtgggaccagctggaccagctgggcatgcgcatgcagcacaacctggagcagcagatccaggccaggaacacaacaggtgtgactgaggaggccctcaaagaattcagcatgatgtttaaacactttgacaaggacaagtctggcaggctgaaccatcaggagttcaaatcttgcctgcgctccctgggctatgacctgcccatggtggaggaaggggaacctgaccctgagttcgaggcaatcctggacacggtggatccgaacagagatggccatgtctccttgcaagaatacatggctttcatgatcagccgcgaaactgagaacgtcaagtccagcgaggagattgagagcgccttccgggccctcagctcagagggaaagccttacgtgaccaaggaggagctctaccagaacctgacccgggaacaagccgactactgcgtctcccacatgaagccctacgtggacggcaagggccgcgagctccccaccgcgttcgactacgtggagttcacccgctcgcttttcgtgaactga

SEQ ID NO: 84 - DNA, 6987 bp, Homo sapiens
atgacatcggccacagagtttgaaaatgtgggcaaccagccaccttacagcaggatcaatgcccgctgggacgccccagacgacgagctggataatgacaacagctcagccaggctctttgagaggtcccggataaaggccttggcagatgagcgggaagttgttcagaaaaagaccttcacgaaatgggtgaactcgcacctggctcgagtgtcctgccgcatcaccgatctctacaaggacctgcgggatgggcgcatgctcatcaagctgctggaggtgctctctggagagatgctgccaaagcccaccaaggggaagatgcgcatccactgcctggagaatgtggacaaggctctccagttcctcaaggagcagcgtgtacacctggagaacatgggctcccacgacattgtagatggcaaccaccgcctggtcctgggcctcatctggaccatcatcctccgcttccagattcaggacattgtggtccaaactcaggaaggtcgtgaaacacgctcagccaaggatgcgttgctgttgtggtgtcagatgaagacggcaggctaccctcatgttaatgtcaccaactttacctccagctggaaggatggcttggcctttaatgccctgatacacaagcaccggcccgacctgatcgactttgataagctgaaggactccaatgcccggcacaacctggagcacgcattcaatgtggctgagcgccagctgggcatcatcccgctcctcgaccccgaagatgtctttacggaaaaccctgatgagaaatccatcatcacctatgtggtggccttttaccactacttctccaagatgaaggtgctggcagtggagggcaagcgtgtcggcaaggttattgaccatgccattgagactgagaagatgattgaaaagtacagcgggctagcctcggacctgctcacctggatcgagcagaccatcactgtcctgaacagccgcaagtttgccaactcgctgacgggcgtccagcagcagctgcaggccttcagcacctaccgcaccgtggagaagccgcccaagtttcaagagaaggggaatctggaagttctactttttaccatccagtcccggatgagagccaacaatcagaaagtgtacacaccccacgatgggaaactagtgtctgacatcaacagggcctgggaaagcctggaggaagctgagtatcggcgggagctggccctgagaaatgagctcattcggcaggagaagctagagcaactggcccggcgctttgaccggaaggccgcaatgagagagacctggctcagtgaaaaccagcgcctcgtggcccaggataactttgggtatgacctggcagctgtggaggccgccaagaagaagcatgaggccatcgagaccgacacggctgcctacgaggagcgggtgagagccctggaggacctggctcaggagctggagaaagagaactaccatgaccagaagcgcatcacggcccgcaaggacaatatactgcgcctatggagctacctgcaggagctgctgcagtcccggcgccagaggctcgagaccaccctggcactgcagaagctcttccaggacatgctgcacagcatcgactggatggatgagatcaaggctcacctcttgtctgccgagtttgggaagcacttgttggaggttgaagacctgctacagaagcacaagttgatggaagctgacatcgccatccaaggggacaaagtgaaggccatcaccgcagccaccctgaagttcaccgaggggaaagggtaccagccttgtgacccccaggtcatccaggaccgcatcagccacttggagcagtgctttgaggagctgagcaacatggcagctgggcggaaggcccaactggagcagtccaaacgactctggaagttcttctgggagatggatgaggctgagagctggatcaaggagaaggagcagatctattcttccctggactatggcaaagacctgaccagtgtgctcatcttacagcgcaagcacaaggcctttgaggatgagctccgtgggctggatgctcacctggagcagatcttccaggaggctcatggcatggttgcgcgcaagcagtttgggcacccgcagatcgaggcccgcataaaggaggtgtcggcacagtgggaccagctgaaggacctggctgccttctgcaagaagaacctccaggatgctgagaactttttccagttccagggcgatgcggatgacctgaaggcttggctgcaagacgcccaccggctgctctctggtgaagatgtggggcaggacgaaggggccacgcgggccctggggaaaaagcacaaggacttcctggaggagctggaggagagccgtggggtgatggagcacctggagcagcaggcccagggattccccgaagagtttcgggattccccagatgtgacccatcggctgcaggccctgcgggagctctaccaacaggtggtggcccaggcggacctgcgtcagcagaggctgcaggaagccctggacctgtacacggtgttcggggagacagacgcctgtgagctgtggatgggagagaaggagaagtggctggccgagatggaaatgccagacaccctggaggacctggaggtcgtgcagcacaggttcgacatcctggaccaggagatgaagaccttgatgactcagattgatggtgtgaacctcgctgccaacagcttggtagagagtggccacccacgcagcagggaggtgaagcagtaccaggaccatctgaacaccaggtggcaggcatttcagaccctggtgtcggagcggcgggaggctgtggactcagccctccgagtgcacaactactgcgtagattgcgaggagaccagcaagtggatcacggacaagacaaaggtagtggagtccacaaaagacctggggcgggacctggcaggtatcatcgccatccagaggaagttgtcagggctggagcgtgacgtggccgccatccaggcccgtgtggatgccctggagcgtgagtcccagcagctgatggactcgcaccctgagcagaaggaggatattggtcagcggcaaaaacacttggaggagctgtggcagggcctgcagcaatccctgcagggccaggaggacttgctgggggaagtcagccagctgcaggccttcctgcaggatctggatgacttccaggcctggctctccatcacccagaaggctgtggcctctgaggacatgcccgaatccctcccagaggctgagcagctcctgcagcagcatgcaggtatcaaggatgagattgacgggcaccaagacagctaccagcgtgttaaggagtctggggagaaagtgatccaaggccagacggacccagagtatctgcttctgggccagcggctggagggcctggatactggctggaatgccctgggcaggatgtgggagagccgcagccacaccctcgctcagtgccttggcttccaggagttccagaaagatgccaagcaggctgaagccatcctcagcaaccaggaatacactctggctcacttggagcccccagactccctggaagctgcagaggctgggatccggaagtttgaggatttcttggggtctatggagaacaaccgggataaggtcttgagtcctgtggactctggaaacaagctggtagctgagggaaacctatactcagacaagatcaaggagaaggtgcagctgattgaggacaggcacaggaagaacaacgagaaggcccaggaggcctctgtcctactgagagacaacctggagctacagaacttcctccagaactgccaggagctcactctctggatcaacgacaagctgctgacatctcaggatgtctcctatgatgaagcacgaaaccttcacaataaatggctaaagcaccaggcgtttgtggcagagctggcttcccatgaagggtggctagagaacatcgatgcggaaggaaagcagctgatggatgagaagccccagtttacagccctggtgtcccaaaagctggaagccctgcaccggctctgggacgagctgcaggccaccacaaaggagaagacccagcacctctcggctgccaggagctccgacctgcgcttgcagacccatgctgacctcaacaagtggatcagcgccatggaggaccagctgcggtcagacgacccgggcaaggacctgaccagtgtcaatcggatgttggctaagctgaagcgagtggaggaccaagtgaatgtgcgaaaagaggagctgggggagctgtttgcccaggtgccttcaatgggagaggagggaggagatgcagacttgagcatcgagaagcggttcctggacctcctggaacccctaggaaggaggaagaagcagctggaatcatccagagccaagctgcagatcagccgggacttagaggatgagacgctttgggtggaggagaggctgcctctggcccagtcagccgactatggcactaatctgcaaactgtgcaactgttcatgaagaagaaccagacactgcagaatgagattctgggccatacgccgcgggttgaggatgtgctgcagagagggcagcagctggtggaggcggcggagatcgactgccaggaccttgaggagcgcctggggcacctgcagagctcctgggacaggctgcgggaggcagcggccgggaggctgcagcgactgagggacgccaacgaggcacagcagtactacctggatgcagacgaggctgaggcctggattggcgagcaggagctctacgtcatctccgatgagatccccaaggatgaagagggcgccattgtgatgctgaagcgacatttgcggcagcagcgtgcggtggaggactacggccggaacatcaagcagctggccagccgggcccagggcctgctgtctgcaggccaccctgagggggaacagatcatcagacttcaggggcaagtggacaagcactacgcagggctgaaggacgtggcggaagagcgcaagcgcaagctggagaacatgtaccacctgttccagctcaagcgggagaccgacgacctggagcagtggatttcagaaaaggagctagtggcctcttccccggaaatggggcaagactttgaccacgtgactcttctgcgggacaagttccgggactttgcccgggagaccggggcgattgggcaggagcgggtggacaatgtgaatgccttcatcgagcgactcatcgacgcgggccacagcgaggcggccaccatcgccgagtggaaggacgggctgaacgagatgtgggcagacctcctggagctcattgacacgcgcatgcagctgctggccgcctcctatgacctgcaccgctacttctacacgggtgccgagatcctgggcctcatcgacgagaagcaccgcgagctgcccgaggacgtggggctggacgccagcacggccgagtccttccaccgggtgcacacagccttcgagcgggagctccacctgctgggtgtccaggtgcagcagttccaggacgtggccacccgtctgcagacagcatatgctggggagaaggcagaggccatccagaacaaggagcaggaggtgtctgccgcgtggcaggcgctgctcgatgcctgtgccgggcgccggacccagctagtggacacggcggataaattccgcttcttcagcatggcccgtgacctcctctcctggatggagagcatcatccggcagatcgagacccaggagaggcccagggatgtctcctctgtggaactgctcatgaagtatcaccagggcatcaatgcagagattgaaacccggagcaagaacttcagtgcctgcctggagcttggcgagtccctgctgcagcggcagcaccaggcctcagaggagatccgcgagaaactgcagcaggtgatgtccaggaggaaagagatgaatgagaagtgggaagcccgctgggagcggctccgcatgttgctggaggtgtgccagttctcgagggatgcctctgtggctgaggcgtggctgattgcccaggagccctacctggccagcggggactttggacacacagtggacagtgtggagaagctcatcaagaggcatgaggcttttgagaagtccacggccagctgggcagagcgctttgctgccctggagaagcccaccacgcttgagctgaaagaacgccagattgcagagagacccgcagaggagactgggcctcaagaggaggaaggcgagacagcaggggaggctccagtttcccaccatgcggccaccgagagaacgtccccgggggaagaagagggaacgtggcctcagaacctgcagcagccaccaccgccgggtcagcacaaggatgggcagaaatccactggggatgagaggcccaccacggagcccctctttaaggtcctagatacgcctctgagcgagggtgatgagcccgcaacgctgccggccccgcgggaccatgggcagagtgtgcagatggaaggctacctgggccgcaagcatgacctggaggggcccaacaagaaggcttccaacaggtcctggaacaacctgtactgtgtgctcaggaacagtgagctaaccttctacaaggatgccaagaacctggccctggggatgccctaccatggggaggaacccctggccctgagacatgccatctgtgagattgctgccaactacaagaagaagaagcacgtctttaagctgaggctgagtaatggcagcgagtggctcttccatggcaaggatgaggaggagatgctgtcctggctgcagggcgtgagcaccgccatcaacgagtcccagagcatccgcgtcaaggcgcagagcctgcccctgccttccctctccggccccgacgccagcctcggcaagaaagacaaggagaagagattcagcttcttccccaaaaagaagtag

SEQ ID NO: 85 - DNA, 6414 bp, Homo sapiens
atgacatcggccacagagtttgaaaatgtgggcaaccagccaccttacagcaggatcaatgcccgctgggacgccccagacgacgagctggataatgacaacagctcagccaggctctttgagaggtcccggataaaggccttggcagatgagcgggaagttgttcagaaaaagaccttcacgaaatgggtgaactcgcacctggctcgagtgtcctgccgcatcaccgatctctacaaggacctgcgggatgggcgcatgctcatcaagctgctggaggtgctctctggagagatgctgccaaagcccaccaaggggaagatgcgcatccactgcctggagaatgtggacaaggctctccagttcctcaaggagcagcgtgtacacctggagaacatgggctcccacgacattgtagatggcaaccaccgcctggtcctgggcctcatctggaccatcatcctccgcttccagattcaggacattgtggtccaaactcaggaaggtcgtgaaacacgctcagccaaggatgcgttgctgttgtggtgtcagatgaagacggcaggctaccctcatgttaatgtcaccaactttacctccagctggaaggatggcttggcctttaatgccctgatacacaagcaccggcccgacctgatcgactttgataagctgaaggactccaatgcccggcacaacctggagcacgcattcaatgtggctgagcgccagctgggcatcatcccgctcctcgaccccgaagatgtctttacggaaaaccctgatgagaaatccatcatcacctatgtggtggccttttaccactacttctccaagatgaaggtgctggcagtggagggcaagcgtgtcggcaaggttattgaccatgccattgagactgagaagatgattgaaaagtacagcgggctagcctcggacctgctcacctggatcgagcagaccatcactgtcctgaacagccgcaagtttgccaactcgctgacgggcgtccagcagcagctgcaggccttcagcacctaccgcaccgtggagaagccgcccaagtttcaagagaaggggaatctggaagttctactttttaccatccagtcccggatgagagccaacaatcagaaagtgtacacaccccacgatgggaaactagtgtctgacatcaacagggcctgggaaagcctggaggaagctgagtatcggcgggagctggccctgagaaatgagctcattcggcaggagaagctagagcaactggcccggcgctttgaccggaaggccgcaatgagagagacctggctcagtgaaaaccagcgcctcgtggcccaggataactttgggtatgacctggcagctgtggaggccgccaagaagaagcatgaggccatcgagaccgacacggctgcctacgaggagcgggtgagagccctggaggacctggctcaggagctggagaaagagaactaccatgaccagaagcgcatcacggcccgcaaggacaatatactgcgcctatggagctacctgcaggagctgctgcagtcccggcgccagaggctcgagaccaccctggcactgcagaagctcttccaggacatgctgcacagcatcgactggatggatgagatcaaggctcacctcttgtctgccgagtttgggaagcacttgttggaggttgaagacctgctacagaagcacaagttgatggaagctgacatcgccatccaaggggacaaagtgaaggccatcaccgcagccaccctgaagttcaccgaggggaaagggtaccagccttgtgacccccaggtcatccaggaccgcatcagccacttggagcagtgctttgaggagctgagcaacatggcagctgggcggaaggcccaactggagcagtccaaacgactctggaagttcttctgggagatggatgaggctgagagctggatcaaggagaaggagcagatctattcttccctggactatggcaaagacctgaccagtgtgctcatcttacagcgcaagcacaaggcctttgaggatgagctccgtgggctggatgctcacctggagcagatcttccaggaggctcatggcatggttgcgcgcaagcagtttgggcacccgcagatcgaggcccgcataaaggaggtgtcggcacagtgggaccagctgaaggacctggctgccttctgcaagaagaacctccaggatgctgagaactttttccagttccagggcgatgcggatgacctgaaggcttggctgcaagacgcccaccggctgctctctggtgaagatgtggggcaggacgaaggggccacgcgggccctggggaaaaagcacaaggacttcctggaggagctggaggagagccgtggggtgatggagcacctggagcagcaggcccagggattccccgaagagtttcgggattccccagatgtgacccatcggctgcaggccctgcgggagctctaccaacaggtggtggcccaggcggacctgcgtcagcagaggctgcaggaagccctggacctgtacacggtgttcggggagacagacgcctgtgagctgtggatgggagagaaggagaagtggctggccgagatggaaatgccagacaccctggaggacctggaggtcgtgcagcacaggttcgacatcctggaccaggagatgaagaccttgatgactcagattgatggtgtgaacctcgctgccaacagcttggtagagagtggccacccacgcagcagggaggtgaagcagtaccaggaccatctgaacaccaggtggcaggcatttcagaccctggtgtcggagcggcgggaggctgtggactcagccctccgagtgcacaactactgcgtagattgcgaggagaccagcaagtggatcacggacaagacaaaggtagtggagtccacaaaagacctggggcgggacctggcaggtatcatcgccatccagaggaagttgtcagggctggagcgtgacgtggccgccatccaggcccgtgtggatgccctggagcgtgagtcccagcagctgatggactcgcaccctgagcagaaggaggatattggtcagcggcaaaaacacttggaggagctgtggcagggcctgcagcaatccctgcagggccaggaggacttgctgggggaagtcagccagctgcaggccttcctgcaggatctggatgacttccaggcctggctctccatcacccagaaggctgtggcctctgaggacatgcccgaatccctcccagaggctgagcagctcctgcagcagcatgcaggtatcaaggatgagattgacgggcaccaagacagctaccagcgtgttaaggagtctggggagaaagtgatccaaggccagacggacccagagtatctgcttctgggccagcggctggagggcctggatactggctggaatgccctgggcaggatgtgggagagccgcagccacaccctcgctcagtgccttggcttccaggagttccagaaagatgccaagcaggctgaagccatcctcagcaaccaggaatacactctggctcacttggagcccccagactccctggaagctgcagaggctgggatccggaagtttgaggatttcttggggtctatggagaacaaccgggataaggtcttgagtcctgtggactctggaaacaagctggtagctgagggaaacctatactcagacaagatcaaggagaaggtgcagctgattgaggacaggcacaggaagaacaacgagaaggcccaggaggcctctgtcctactgagagacaacctggagctacagaacttcctccagaactgccaggagctcactctctggatcaacgacaagctgctgacatctcaggatgtctcctatgatgaagcacgaaaccttcacaataaatggctaaagcaccaggcgtttgtggcagagctggcttcccatgaagggtggctagagaacatcgatgcggaaggaaagcagctgatggatgagaagccccagtttacagccctggtgtcccaaaagctggaagccctgcaccggctctgggacgagctgcaggccaccacaaaggagaagacccagcacctctcggctgccaggagctccgacctgcgcttgcagacccatgctgacctcaacaagtggatcagcgccatggaggaccagctgcggtcagacgacccgggcaaggacctgaccagtgtcaatcggatgttggctaagctgaagcgagtggaggaccaagtgaatgtgcgaaaagaggagctgggggagctgtttgcccaggtgccttcaatgggagaggagggaggagatgcagacttgagcatcgagaagcggttcctggacctcctggaacccctaggaaggaggaagaagcagctggaatcatccagagccaagctgcagatcagccgggacttagaggatgagacgctttgggtggaggagaggctgcctctggcccagtcagccgactatggcactaatctgcaaactgtgcaactgttcatgaagaagaaccagacactgcagaatgagattctgggccatacgccgcgggttgaggatgtgctgcagagagggcagcagctggtggaggcggcggagatcgactgccaggaccttgaggagcgcctggggcacctgcagagctcctgggacaggctgcgggaggcagcggccgggaggctgcagcgactgagggacgccaacgaggcacagcagtactacctggatgcagacgaggctgaggcctggattggcgagcaggagctctacgtcatctccgatgagatccccaaggatgaagagggcgccattgtgatgctgaagcgacatttgcggcagcagcgtgcggtggaggactacggccggaacatcaagcagctggccagccgggcccagggcctgctgtctgcaggccaccctgagggggaacagatcatcagacttcaggggcaagtggacaagcactacgcagggctgaaggacgtggcggaagagcgcaagcgcaagctggagaacatgtaccacctgttccagctcaagcgggagaccgacgacctggagcagtggatttcagaaaaggagctagtggcctcttccccggaaatggggcaagactttgaccacgtgactcttctgcgggacaagttccgggactttgcccgggagaccggggcgattgggcaggagcgggtggacaatgtgaatgccttcatcgagcgactcatcgacgcgggccacagcgaggcggccaccatcgccgagtggaaggacgggctgaacgagatgtgggcagacctcctggagctcattgacacgcgcatgcagctgctggccgcctcctatgacctgcaccgctacttctacacgggtgccgagatcctgggcctcatcgacgagaagcaccgcgagctgcccgaggacgtggggctggacgccagcacggccgagtccttccaccgggtgcacacagccttcgagcgggagctccacctgctgggtgtccaggtgcagcagttccaggacgtggccacccgtctgcagacagcatatgctggggagaaggcagaggccatccagaacaaggagcaggaggtgtctgccgcgtggcaggcgctgctcgatgcctgtgccgggcgccggacccagctagtggacacggcggataaattccgcttcttcagcatggcccgtgacctcctctcctggatggagagcatcatccggcagatcgagacccaggagaggcccagggatgtctcctctgtggaactgctcatgaagtatcaccagggcatcaatgcagagattgaaacccggagcaagaacttcagtgcctgcctggagcttggcgagtccctgctgcagcggcagcaccaggcctcagaggagatccgcgagaaactgcagcaggtgatgtccaggaggaaagagatgaatgagaagtgggaagcccgctgggagcggctccgcatgttgctggaggtgtgccagttctcgagggatgcctctgtggctgaggcgtggctgattgcccaggagccctacctggccagcggggactttggacacacagtggacagtgtggagaagctcatcaagaggcatgaggcttttgagaagtccacggccagctgggcagagcgctttgctgccctggagaagcccaccacgcttgagctgaaagaacgccagattgcagagagacccgcagaggagactgggcctcaagaggaggaaggcgagacagcaggggaggctccagtttcccaccatgcggccaccgagagaacgtccccggtcagtctctggtctcgtttgtctagttcctgggagtcactgcagccagagccctctcacccctactag

SEQ ID NO: 86 - DNA, 7095 bp, Homo sapiens
atgacgaccacagtagccacagactatgacaacattgagatccagcagcagtacagtgatgtcaacaaccgctgggatgtcgacgactgggacaatgagaacagctctgcgcggctttttgagcggtcccgcatcaaggctctggcagatgagcgtgaagccgtgcagaagaagaccttcaccaagtgggtcaattcccaccttgcccgtgtgtcctgccggatcacagacctgtacactgaccttcgagatggacggatgctcatcaagctgctggaggtcctctctggagagaggctgcctaaacccaccaagggacgaatgcgcatccactgcttagagaatgtggacaaggcccttcagttcctgaaggagcagagagtccatcttgagaacatggggtcccatgacatcgtggatggaaaccaccggctgacccttggcctcatctggaccatcatcctgcgcttccagatccaggatatcagtgtggaaactgaagacaacaaagagaagaaatctgccaaggatgcattgctgttgtggtgccagatgaagacagctgggtaccccaatgtcaacattcacaatttcaccactagctggagggacggcatggccttcaatgcactgatacacaaacaccggcctgacctgatagattttgacaaactaaagaaatctaacgcacactacaacctgcagaatgcatttaatctggcagaacagcacctcggcctcactaaactgttggaccccgaagacatcagcgtggaccatcctgatgagaagtccataatcacttatgtggtgacttattaccactacttctctaagatgaaggccttagctgttgaaggaaaacgaattggaaaggtgcttgacaatgctattgaaacagaaaaaatgattgaaaagtatgaatcacttgcctctgaccttctggaatggattgaacaaaccatcatcattctgaacaatcgcaaatttgccaattcactggtcggggttcaacagcagcttcaggcattcaacacttaccgcactgtggagaaaccacccaaatttactgagaaggggaacttggaagtgctgctcttcaccattcagagcaagatgagggccaacaaccagaaggtctacatgccccgggaggggaagctcatctctgacatcaacaaggcctgggaaagactggaaaaagcggaacacgaaagagaactggctttgcggaatgagctcataagacaggagaaactggaacagctcgcccgcagatttgatcgcaaggcagctatgagggagacttggctgagcgaaaaccagcgtctggtgtctcaggacaactttgggtttgaccttcctgcagttgaggccgccacaaaaaagcacgaggccattgagacagacattgccgcatacgaggagcgtgtgcaggctgtggtagccgtggccagggagctcgaggccgagaattaccacgacatcaagcgcatcacagcgaggaaggacaatgtcatccggctctgggaatacctactggaactgctcagggcccggagacagcggctcgagatgaacctggggctgcagaagatattccaggaaatgctctacattatggactggatggatgaaatgaaggtgctagtattgtctcaagactatggcaaacacttacttggtgtggaagacctgttacagaagcacaccctggttgaagcagacattggcatccaggcagagcgggtgagaggtgtcaatgcctccgcccagaagttcgcaacagacggggaaggttacaagccctgtgacccccaggtgatccgagaccgcgtggcccacatggagttctgttatcaagagctttgccagctggcggctgagcgcagggcccgtctggaagagtcccgccgcctctggaagttcttctgggagatggcagaagaggaaggctggatacgggagaaggagaagatcctgtcctcggacgattacgggaaagacctgaccagcgtcatgcgcctgctcagcaagcaccgggcgttcgaggacgagatgagcggccgcagtggccactttgagcaggccatcaaggaaggcgaagacatgatcgcggaggagcacttcgggtcggagaagatccgtgagaggatcatttacatccgggagcagtgggccaacctagagcagctctcggccattcggaagaagcgcctggaggaggcctccctgctgcaccagttccaggcagatgctgatgacattgatgcctggatgctggacatcctcaagattgtctccagcagcgacgtgggccacgatgagtattccacacagtctctggtcaagaaacacaaggacgtggcggaagagatcgccaattacaggcccacccttgacacgctgcacgaacaagccagcgccctcccccaggagcatgccgagtctccagacgtgaggggcaggctgtcgggcatcgaggagcggtataaggaggtggcagagctgacgcggctgcggaagcaggcactccaggacactctggccctgtacaagatgttcagcgaggctgatgcctgtgagctctggatcgacgagaaggagcagtggctcaacaacatgcagatcccagagaagctggaggatctggaggtcatccagcacagatttgagagcctagaaccagaaatgaacaaccaggcttcccgggttgcagtggtgaaccagattgcacgccagctgatgcacagcggccacccaagtgagaaggaaatcaaagcccagcaggacaaactcaacacaaggtggagccagttcagagaactggttgacaggaagaaggatgccctcctgtctgccctgagcatccagaactaccacctcgagtgcaatgaaaccaaatcctggattcgggaaaagaccaaggtcatcgagtccacccaggacctgggcaatgacctggctggcgtcatggccctgcagcgcaagctgaccggcatggagcgggacttggtggccattgaggcaaagctgagtgacctgcagaaggaggcggagaagctggagtccgagcaccccgaccaggcccaggccatcctgtctcggctggccgagatcagcgacgtgtgggaggagatgaagaccaccctgaaaaaccgagaggcctccctgggagaggccagcaagctgcagcagttcctacgggacttggacgacttccagtcctggctctctaggacccagacagcgatcgcctcggaggacatgccaaacaccctgaccgaggctgagaagctgctcacgcagcacgagaacatcaagaacgagatcgacaactacgaggaggactaccagaagatgagggacatgggcgagatggtcacccaggggcagaccgatgcccagtacatgtttctgcggcagcggctgcaggccctggacactggatggaacgagctccacaagatgtgggagaacagacaaaatctcctatcccagtcacatgcctaccagcagttcctcagagacacgaagcaagccgaagcctttcttaacaaccaggagtatgttctggctcacactgaaatgcctaccaccttggaaggagctgaagcagcaattaaaaagcaagaggacttcatgaccaccatggacgccaatgaggagaagatcaatgctgtggtggagactggccggaggctggtgagcgatgggaacatcaactcagatcgcatccaggagaaggtggactctattgatgacagacataggaagaatcgtgagacagccagtgaacttttgatgaggttgaaggacaacagggatctacagaaattcctgcaagattgtcaagagctgtctctctggatcaatgagaagatgctcacagcccaggacatgtcttacgatgaagccagaaatctgcacagtaaatggttgaagcatcaagcatttatggcagaacttgcatccaacaaagaatggcttgacaaaatcgagaaggaaggaatgcagctcatttcagaaaagcctgagacggaagctgtggtgaaggagaaactcactggtttacataaaatgtgggaagtccttgaatccactacccagacaaaggcccagcggctctttgatgcaaacaaggccgaacttttcacccagagctgtgcagatctagacaaatggctgcacggcctggagagtcagattcagtctgatgactatggcaaagacctgaccagtgtcaatatcctgctgaaaaagcaacagatgctggagaatcagatggaagtgcggaagaaggagatcgaagagctccaaagccaagcccaggccctgagtcaggaagggaagagcaccgacgaggtagacagcaagcgcctcaccgtgcagaccaagttcatggagttgctggagcccttgaacgagaggaagcataacctgctggcctccaaagagatccatcagttcaacagggatgtggaggacgagatcttgtgggttggagagaggatgcctttggcaacttccacggatcatggccacaacctccagactgtgcagctgttaataaagaaaaatcagaccctccagaaagaaatccaggggcaccagcctcgcattgacgacatctttgagaggagccaaaacatcgtcactgacagcagcagcctcagcgctgaggccatcagacagaggcttgccgacctgaagcagctgtggggtctcctcattgaggagacagagaaacgccacaggcggctggaggaggcgcacagggcccagcagtactactttgacgctgctgaggccgaagcctggatgagcgagcaggagctgtacatgatgtcagaggagaaggccaaggatgagcagagtgctgtctccatgttgaagaagcaccagatcttagaacaagctgtggaggactatgcagagaccgtgcatcagctctccaagaccagccgggccctggtggccgacagccatcctgaaagtgagcgcattagcatgcggcagtccaaagtggataaactgtacgctggtctgaaagaccttgctgaagagagaagaggcaagctggatgagagacacaggttattccagctcaaccgggaggtggacgacctggagcagtggatcgctgagagggaggtggtcgcagggtcccatgaactgggacaggactatgagcatgtcacgatgttacaagaacgattccgggagtttgcccgagacaccgggaacattgggcaggagcgcgtggacacggtcaatcacctggcagatgagctcatcaactctggacattcagatgccgccaccatcgctgaatggaaggatggcctcaatgaagcctgggccgacctcctggagctcattgacacaagaacacagattcttgccgcttcctatgaactgcacaagttttaccacgatgccaaggagatctttgggcgtatacaggacaaacacaagaaactccctgaggagcttgggagagatcagaacacagtggagaccttacagagaatgcacactacatttgagcatgacatccaggctctgggcacacaggtgaggcagctgcaggaggatgcagcccgcctccaggcggcctatgcgggtgacaaggccgacgatatccagaagcgcgagaacgaggtcctggaagcctggaagtccctcctggacgcctgtgagagccgcagggtgcggctggtggacacaggggacaagttccgcttcttcagcatggtgcgcgacctcatgctctggatggaggatgtcatccggcagatcgaggcccaggagaagccaagggatgtatcatctgttgaactcttaatgaataatcatcaaggcatcaaagctgaaattgatgcacgtaatgacagtttcacaacctgcattgaacttgggaaatccctgttggcgagaaaacactatgcatctgaggagatcaaggaaaaattactgcagttgacggaaaagaggaaagaaatgatcgacaagtgggaagaccgatgggaatggttaagactgattctggaggtccatcagttctcaagagacgccagtgtggccgaggcctggctgcttggacaggagccgtacctatccagccgagagataggccagagcgtggacgaggtggagaagctcatcaagcgccacgaggcatttgaaaagtctgcagcaacctgggatgagaggttctctgccctggaaaggctgactacattggagttactggaagtgcgcagacagcaagaggaagaggagaggaagaggcggccgccttctcccgagccgagcacgaaggtttcagaggaagccgagtcccagcagcagtgggatacttcaaaaggagaacaagtttcccaaaacggtttgccagctgaacagggatctccacggatggcagaaacggtggacacaagcgaaatggtcaacggcgctacagaacaaaggacgagctctaaagagtccagccccatcccctccccgacctctgatcgtaaagccaagactgccctcccagcccagagtgccgccaccttaccagccagaacccaggagacaccttcggcccagatggaaggcttcctcaatcggaaacacgagtgggaggcccacaataagaaagcctcaagcaggtcctggcacaatgtttattgtgtcataaataaccaagaaatgggtttctacaaagatgcaaagactgctgcttctggaattccctaccacagcgaggtccctgtgagtttgaaagaagctgtctgcgaagtggcccttgattacaaaaagaagaaacacgtattcaagctaagactaaatgatggcaatgagtacctcttccaagccaaagacgatgaggaaatgaacacatggatccaggctatctcttccgccatctcctctgataaacacgaggtgtctgccagcacccagagcacgccagcatccagccgcgcgcagaccctccccaccagcgtcgtcaccatcaccagcgagtccagtcccggcaagcgggaaaaggacaaagagaaagacaaagagaagcggttcagcctttttggcaaaaagaaatga

SEQ ID NO: 87 - DNA, 6468 bp, Homo sapiens
atggaattgcagaggacgtctagtatctccgggccgctgtcgccggcgtacacggggcaggtgccttacaactacaaccagctggaaggcagattcaagcagctgcaagatgagcgtgaagccgtgcagaagaagaccttcaccaagtgggtcaattcccaccttgcccgtgtgtcctgccggatcacagacctgtacactgaccttcgagatggacggatgctcatcaagctgctggaggtcctctctggagagaggctgcctaaacccaccaagggacgaatgcgcatccactgcttagagaatgtggacaaggcccttcagttcctgaaggagcagagagtccatcttgagaacatggggtcccatgacatcgtggatggaaaccaccggctgacccttggcctcatctggaccatcatcctgcgcttccagatccaggatatcagtgtggaaactgaagacaacaaagagaagaaatctgccaaggatgcattgctgttgtggtgccagatgaagacagctgggtaccccaatgtcaacattcacaatttcaccactagctggagggacggcatggccttcaatgcactgatacacaaacaccggcctgacctgatagattttgacaaactaaagaaatctaacgcacactacaacctgcagaatgcatttaatctggcagaacagcacctcggcctcactaaactgttggaccccgaagacatcagcgtggaccatcctgatgagaagtccataatcacttatgtggtgacttattaccactacttctctaagatgaaggccttagctgttgaaggaaaacgaattggaaaggtgcttgacaatgctattgaaacagaaaaaatgattgaaaagtatgaatcacttgcctctgaccttctggaatggattgaacaaaccatcatcattctgaacaatcgcaaatttgccaattcactggtcggggttcaacagcagcttcaggcattcaacacttaccgcactgtggagaaaccacccaaatttactgagaaggggaacttggaagtgctgctcttcaccattcagagcaagatgagggccaacaaccagaaggtctacatgccccgggaggggaagctcatctctgacatcaacaaggcctgggaaagactggaaaaagcggaacacgaaagagaactggctttgcggaatgagctcataagacaggagaaactggaacagctcgcccgcagatttgatcgcaaggcagctatgagggagacttggctgagcgaaaaccagcgtctggtgtctcaggacaactttgggtttgaccttcctgcagttgaggccgccacaaaaaagcacgaggccattgagacagacattgccgcatacgaggagcgtgtgcaggctgtggtagccgtggccagggagctcgaggccgagaattaccacgacatcaagcgcatcacagcgaggaaggacaatgtcatccggctctgggaatacctactggaactgctcagggcccggagacagcggctcgagatgaacctggggctgcagaagatattccaggaaatgctctacattatggactggatggatgaaatgaaggtgctagtattgtctcaagactatggcaaacacttacttggtgtggaagacctgttacagaagcacaccctggttgaagcagacattggcatccaggcagagcgggtgagaggtgtcaatgcctccgcccagaagttcgcaacagacggggaaggttacaagccctgtgacccccaggtgatccgagaccgcgtggcccacatggagttctgttatcaagagctttgccagctggcggctgagcgcagggcccgtctggaagagtcccgccgcctctggaagttcttctgggagatggcagaagaggaaggctggatacgggagaaggagaagatcctgtcctcggacgattacgggaaagacctgaccagcgtcatgcgcctgctcagcaagcaccgggcgttcgaggacgagatgagcggccgcagtggccactttgagcaggccatcaaggaaggcgaagacatgatcgcggaggagcacttcgggtcggagaagatccgtgagaggatcatttacatccgggagcagtgggccaacctagagcagctctcggccattcggaagaagcgcctggaggaggcctccctgctgcaccagttccaggcagatgctgatgacattgatgcctggatgctggacatcctcaagattgtctccagcagcgacgtgggccacgatgagtattccacacagtctctggtcaagaaacacaaggacgtggcggaagagatcgccaattacaggcccacccttgacacgctgcacgaacaagccagcgccctcccccaggagcatgccgagtctccagacgtgaggggcaggctgtcgggcatcgaggagcggtataaggaggtggcagagctgacgcggctgcggaagcaggcactccaggacactctggccctgtacaagatgttcagcgaggctgatgcctgtgagctctggatcgacgagaaggagcagtggctcaacaacatgcagatcccagagaagctggaggatctggaggtcatccagcacagatttgagagcctagaaccagaaatgaacaaccaggcttcccgggttgcagtggtgaaccagattgcacgccagctgatgcacagcggccacccaagtgagaaggaaatcaaagcccagcaggacaaactcaacacaaggtggagccagttcagagaactggttgacaggaagaaggatgccctcctgtctgccctgagcatccagaactaccacctcgagtgcaatgaaaccaaatcctggattcgggaaaagaccaaggtcatcgagtccacccaggacctgggcaatgacctggctggcgtcatggccctgcagcgcaagctgaccggcatggagcgggacttggtggccattgaggcaaagctgagtgacctgcagaaggaggcggagaagctggagtccgagcaccccgaccaggcccaggccatcctgtctcggctggccgagatcagcgacgtgtgggaggagatgaagaccaccctgaaaaaccgagaggcctccctgggagaggccagcaagctgcagcagttcctacgggacttggacgacttccagtcctggctctctaggacccagacagcgatcgcctcggaggacatgccaaacaccctgaccgaggctgagaagctgctcacgcagcacgagaacatcaagaacgagatcgacaactacgaggaggactaccagaagatgagggacatgggcgagatggtcacccaggggcagaccgatgcccagtacatgtttctgcggcagcggctgcaggccctggacactggatggaacgagctccacaagatgtgggagaacagacaaaatctcctatcccagtcacatgcctaccagcagttcctcagagacacgaagcaagccgaagcctttcttaacaaccaggagtatgttctggctcacactgaaatgcctaccaccttggaaggagctgaagcagcaattaaaaagcaagaggacttcatgaccaccatggacgccaatgaggagaagatcaatgctgtggtggagactggccggaggctggtgagcgatgggaacatcaactcagatcgcatccaggagaaggtggactctattgatgacagacataggaagaatcgtgagacagccagtgaacttttgatgaggttgaaggacaacagggatctacagaaattcctgcaagattgtcaagagctgtctctctggatcaatgagaagatgctcacagcccaggacatgtcttacgatgaagccagaaatctgcacagtaaatggttgaagcatcaagcatttatggcagaacttgcatccaacaaagaatggcttgacaaaatcgagaaggaaggaatgcagctcatttcagaaaagcctgagacggaagctgtggtgaaggagaaactcactggtttacataaaatgtgggaagtccttgaatccactacccagacaaaggcccagcggctctttgatgcaaacaaggccgaacttttcacccagagctgtgcagatctagacaaatggctgcacggcctggagagtcagattcagtctgatgactatggcaaagacctgaccagtgtcaatatcctgctgaaaaagcaacagatgctggagaatcagatggaagtgcggaagaaggagatcgaagagctccaaagccaagcccaggccctgagtcaggaagggaagagcaccgacgaggtagacagcaagcgcctcaccgtgcagaccaagttcatggagttgctggagcccttgaacgagaggaagcataacctgctggcctccaaagagatccatcagttcaacagggatgtggaggacgagatcttgtgggttggagagaggatgcctttggcaacttccacggatcatggccacaacctccagactgtgcagctgttaataaagaaaaatcagaccctccagaaagaaatccaggggcaccagcctcgcattgacgacatctttgagaggagccaaaacatcgtcactgacagcagcagcctcagcgctgaggccatcagacagaggcttgccgacctgaagcagctgtggggtctcctcattgaggagacagagaaacgccacaggcggctggaggaggcgcacagggcccagcagtactactttgacgctgctgaggccgaagcctggatgagcgagcaggagctgtacatgatgtcagaggagaaggccaaggatgagcagagtgctgtctccatgttgaagaagcaccagatcttagaacaagctgtggaggactatgcagagaccgtgcatcagctctccaagaccagccgggccctggtggccgacagccatcctgaaagtgagcgcattagcatgcggcagtccaaagtggataaactgtacgctggtctgaaagaccttgctgaagagagaagaggcaagctggatgagagacacaggttattccagctcaaccgggaggtggacgacctggagcagtggatcgctgagagggaggtggtcgcagggtcccatgaactgggacaggactatgagcatgtcacgatgttacaagaacgattccgggagtttgcccgagacaccgggaacattgggcaggagcgcgtggacacggtcaatcacctggcagatgagctcatcaactctggacattcagatgccgccaccatcgctgaatggaaggatggcctcaatgaagcctgggccgacctcctggagctcattgacacaagaacacagattcttgccgcttcctatgaactgcacaagttttaccacgatgccaaggagatctttgggcgtatacaggacaaacacaagaaactccctgaggagcttgggagagatcagaacacagtggagaccttacagagaatgcacactacatttgagcatgacatccaggctctgggcacacaggtgaggcagctgcaggaggatgcagcccgcctccaggcggcctatgcgggtgacaaggccgacgatatccagaagcgcgagaacgaggtcctggaagcctggaagtccctcctggacgcctgtgagagccgcagggtgcggctggtggacacaggggacaagttccgcttcttcagcatggtgcgcgacctcatgctctggatggaggatgtcatccggcagatcgaggcccaggagaagccaagggatgtatcatctgttgaactcttaatgaataatcatcaaggcatcaaagctgaaattgatgcacgtaatgacagtttcacaacctgcattgaacttgggaaatccctgttggcgagaaaacactatgcatctgaggagatcaaggaaaaattactgcagttgacggaaaagaggaaagaaatgatcgacaagtgggaagaccgatgggaatggttaagactgattctggaggtccatcagttctcaagagacgccagtgtggccgaggcctggctgcttggacaggagccgtacctatccagccgagagataggccagagcgtggacgaggtggagaagctcatcaagcgccacgaggcatttgaaaagtctgcagcaacctgggatgagaggttctctgccctggaaaggctgactacattggagttactggaagtgcgcagacagcaagaggaagaggagaggaagaggcggccgccttctcccgagccgagcacgaaggtttcagaggaagccgagtcccagcagcagtgggatacttcaaaaggagaacaagtttcccaaaacggtttgccagctgaacagggatctccacgggttagttaccgctctcaaacctaccaaaactacaaaaactttaatagcagacggacagccagtgaccagccatggtctggactgtga

SEQ ID NO: 88 - DNA, 7173 bp, Homo sapiens
atgagcagcacgctgtcacccacagactttgacagcttggaaatccagggccagtacagtgacatcaacaaccgctgggaccttcctgactcggactgggacaatgacagcagctcggcccgcctctttgagaggtctcgcattaaggctctggcagatgaacgagaagctgtgcagaagaaaaccttcaccaagtgggtaaactcgcacctggcccgggtcacgtgccgggtgggggacctgtacagcgacctccgggacggacgcaacctgctgaggctcctcgaggtgctctcgggagagatactgccaaagcctacaaagggccgcatgcggatccactgcctggagaacgtggacaaggcactgcagttcctcaaggagcagaaagtgcacttggaaaacatgggctcccatgacattgtggacggaaaccaccgactgacccttgggctggtctggaccatcatccttcgattccagatccaagacatcagtgtggagacagaagacaacaaggagaagaagtcagccaaggatgccctgcttctgtggtgccagatgaagactgcaggttatcccaacgtcaatgtacacaacttcaccaccagctggagagatggactagctttcaacgccatcgtgcataaacaccggccagacctgctggattttgagtctctgaagaagtgtaatgcacactataatctgcagaatgcattcaatctggctgaaaaggaactgggacttaccaagctgctggatcccgaagacgtgaatgtggaccagccagatgagaagtcaatcattacctatgtggctacttactaccattacttctccaagatgaaggccctggccgtggaaggcaagagaattggcaaggtgctggaccatgccatggaggcagagcgcctggtggagaaatacgagtccctggcctcggagctgctgcagtggatcgagcaaacgatcgtgaccctcaatgaccggcagttggccaactcccttagcggggtccagaaccagctgcagtccttcaactcctaccgcaccgtggagaagccgcccaagtttaccgagaaagggaacttggaagtgctgctcttcaccatccagagcaagcttcgggccaacaaccagaaggtctacacgccccgcgagggccggctcatctcggacatcaacaaggcttgggagcggctggagaaggcggagcacgagcgtgagctggccctgcgcaccgagctcatccgccaggagaagctggagcagctggccgcccgcttcgaccgcaaggctgccatgcgggagacctggctcagcgagaaccagcgcctcgtgtcccaggacaactttgggctggagctggcagctgtcgaggcagcagtacggaagcacgaagccattgagacggacatcgtggcctacagcggccgggtgcaggcagtggacgccgtggctgcagagctggccgccgagcgctaccacgacatcaagcgcatcgccgctcggcagcacaacgtggcacggctctgggacttcttgcggcagatggtggccgcccggcgggagcggctcctcctcaacctggagctgcagaaggtgttccaggacctgctctacctcatggactggatggaagagatgaagggccggctgcagtctcaggacctgggcaggcacctagcaggagtggaggacctgctgcagctgcacgagctggtggaggcagacatcgccgtgcaggccgagagggtgcgggccgtcagcgcctctgccctgcgcttctgcaacccagggaaagagtatagaccttgcgacccgcagctggtgtcggagcgggtggccaagctagagcagagctatgaggcactgtgcgagttggcagcggcgcggcgggcccggctggaggaatcacggcggctctggcgtttcctctgggaggtgggtgaagctgaggcctgggtgcgggagcagcagcacctcctggcctcagccgacacgggccgagacctgaccggtgccctccgcctgctcaacaagcacacagccctgcggggcgagatgagcggccggctggggcccctgaagctcaccctggagcagggccagcagttggtggccgagggtcaccctggggcaagccaggcctctgcccgtgcagctgaactccaagcccagtgggagcggctagaggccctggccgaggagcgtgcccagcggctggcccaagccgccagcctctaccagttccaggccgatgcaaacgacatggaggcctggttggttgacgcactgcgcctggtgtccagccccgagctggggcacgacgagttctccacgcaggctctagccaggcagcatcgggccctggaggaggagattcgaagccaccggccaaccctggacgccttgagggaacaggcagcagccctgccccccacactgagccgcacgcccgaggtgcagggccgggtgcccaccctggagcggcactacgaggagctgcaggcccgggcaggcgagcgagcgcgggccttggaggcagccctggcgctctacaccatgctcagcgaggccggggcctgtggactctgggtggaggagaaggagcagtggctcaacgggctggccctgcctgaacgcctggaggacctggaggtcgtgcagcagaggttcgagaccctggagcctgaaatgaacacccttgcagcacaaatcaccgcggtgaatgacattgccgagcagttactgaaggccaaccccccaggcaaagaccgcattgtcaacacccaggagcagctcaaccacaggtggcagcagtttcggcgtctggcagacggcaagaaggcagctctcacctcagccctgagcatccagaactaccacttagagtgcacggagacccaggcctggatgagagagaagaccaaagtcatcgagtccacccagggcctaggcaacgatctggctggggtgctggccctgcagcgcaagctggccggcacggagcgggacctggaggccatcgccgcccgggtgggcgaactgactcgagaggcaaatgccctggctgccggccatcccgctcaggcagtggccatcaacgcccggctgagagaggtgcagaccggctgggaggacctcagggccaccatgcggcgtcgagaagagtcgctgggggaggcgcggcggctgcaggacttcttgcgcagcttggatgacttccaggcctggctaggccgcactcagactgctgtggcctctgaagaagggccggccaccctgcctgaggcagaggccctcctggcccaacatgcagccctgcggggagaggtggagcgggcccagagcgagtatagccggctgcgagccctgggcgaggaggtgacccgggaccaggctgacccccagtgcctcttcctacgacagcgactggaggccctgggaactggctgggaggagctgggccgaatgtgggagagccggcaaggtcgcctggcccaggcccacggcttccagggattcctgcgggatgctcgtcaggctgagggcgtgctcagcagccaggaatatgttctgtctcacacggagatgccagggacactccaggctgctgatgctgccattaaaaaactggaggacttcatgagcaccatggacgccaatggggaacggatccacgggctcctggaggctggccgccagctggtatctgaaggcaacatccacgccgacaagattcgggaaaaggcagactccattgagaggaggcacaagaagaatcaagacgcagcgcagcaatttctgggccgtcttcgggacaaccgggagcagcagcatttcctgcaagattgtcacgagctgaagctctggatcgacgagaagatgctgacagcccaggacgtgtcctatgacgaggcccgcaacctgcatactaagtggcagaagcaccaggcattcatggccgagctggctgccaacaaagactggctggacaaggtggacaaggaagggcgagagctcacccttgagaagccagagctgaaagccctggtgtcggagaagctgagagacctgcacaggcgctgggacgagctggagaccaccacccaagccaaggcccgcagcctctttgatgccaaccgagctgagctgtttgcccagagctgctgtgccctggagagctggctggagagcctgcaggcccagctgcactcggatgactacggcaaggacctcaccagcgtcaacatcctgctcaagaagcagcagatgctggaatgggagatggctgtgagagagaaggaggtggaggcaatccaggcccaggccaaagcactggcccaggaggaccagggtgcaggggaggtggagagaacctcgagggccgtggaggagaagttcagggccttgtgccagcccatgcgggaacgctgccggcgcctgcaggcttctcgcgagcagcaccagttccaccgcgatgtggaagatgagattttgtgggtgacagagcggctgcccatggccagctccatggagcatggcaaggacctgcccagcgtccagcttctcatgaagaaaaaccagaccctgcagaaagagattcagggccatgagccccggatcgcggacctgagggagcggcagcgtgctctaggtgcagcagcagcaggtccagagctggctgagctgcaggaaatgtggaaacgcctgggccacgagctggaacttcgagggaagcgactggaggatgccctgcgagcccagcagttctaccgcgatgccgccgaggcggaggcctggatgggcgagcaggaattacacatgatgggccaggagaaggccaaggatgagctgagtgcccaggcagaggtgaagaagcaccaggtgctggagcaagccctggccgactacgcgcagaccatccaccagctggcggccagcagccaggacatgattgaccacgagcacccagagagcactcggatatccatccgccaagcccaggtggacaagctgtatgccggcctgaaggagctggctggagagcggcgggagcgcctgcaggagcacctccggctgtgccagctccgccgcgagctggatgacctggaacagtggatccaggagcgcgaggtggtggcggcctcccacgagctgggccaggactacgagcatgtgactatgctccgagacaaattccgagagttctcccgggacacaagcaccatcggtcaggagcgcgtagatagcgccaatgcgctggccaatgggctcattgctgggggccatgctgcacgggccaccgtggccgagtggaaggacagtctcaacgaggcctgggctgacctgcttgagctgctggacacacggggtcaggtgctggccgcggcgtacgagctgcagcgcttcctgcacggggcacgccaagccctggcgcgggtgcagcacaagcagcagcagcttccggacgggactggccgcgacctcaacgctgccgaggccctgcagcgccgacactgtgcctacgagcatgacattcaggccctcagcccccaggtccagcaggtgcaggacgacggccaccggctccagaaggcctacgctggagacaaggctgaggagatcggccgccacatgcaggccgtggccgaggcctgggcccagcttcagggaagctctgccgcccgccggcagctgctgctggacaccacagacaagttccgcttcttcaaggctgtccgggaactgatgctctggatggatgaggtcaacctgcagatggatgcccaggagcgtccccgggatgtgtcctccgcggatctagtcatcaagaaccagcaaggcatcaaggcagagatagaggcccgggcagaccgcttctcctcctgcatcgacatggggaaggagctgctggccaggagccactatgcggccgaggagatctcagagaagctgtctcagctgcaggcacggcgccaggagacagctgagaagtggcaggagaagatggactggcttcagctggttttggaggtgcttgtgtttggaagagatgcagggatggcagaggcctggctctgcagccaggagccactggtgcgcagcgctgagctgggttgcacggtcgacgaagttgagagcctcatcaagcggcacgaggccttccagaagtcagcagtggcctgggaggagcgattctgtgcgctggagaagcttactgcgctagaggagcgggagaaggagcgaaagagaaagagggaggaggaggagcggcggaaacagccgcctgctcccgaacccacagccagtgtgcctccaggggacctggtgggcggccagacagcttctgacaccacctgggacggaacccagccacggccaccaccatccacacaagcacccagtgttaatggagtctgcacagatggagagccctcacagcccctgctgggacaacagagacttgagcacagcagcttccccgaagggccgggacctggctcaggggacgaagccaatgggccccggggagagaggcagacccggactcggggcccggccccatctgcaatgccccagagcaggtctaccgagtcagcccatgctgccaccctgccgcctcgaggcccagagccatctgcccaggagcagatggaggggatgctgtgccgcaagcaggagatggaggccttcgggaagaaggctgccaacaggtcctggcagaacgtgtactgtgtcctgcggcgtgggagcctcggcttttacaaggatgccaaggcagccagcgcgggagtgccataccacggagaagtgcctgtcagcctggccagggcccagggcagcgtcgcctttgattaccgaaagcgcaaacatgtcttcaagctgggcttacaggatggaaaagaatatttattccaggccaaggatgaggcagagatgagctcgtggctacgggtggtgaatgcagccattgccacagcgtcttctgcctctggagagcctgaagagccggtggtgcccagcaccacccggggcatgacccgggccatgaccatgcccccagtgtcacccgtcggggctgaggggcctgttgtgctccgcagcaaagacggcagagaacgagagcgagaaaaacgcttcagcttctttaagaagaacaagtag

SEQ ID NO: 89 - DNA, 7248 bp, Mus musculus
atggaaactccaaaggaaactgctgtcgagagcagcggaccaaaggtcctagaaacagcagaagaaatccaacaccgaagagcggaggtgttaaaccagtaccagaggttcaaggatcgcgttgccgagaggggtcagaagcttgaggagtcttaccactatcaagttttcaggagagacgcagatgacctggagaagtggatcatggaaaagcttgaaattgcaaaagataagacatatgaacccacaaacatacaggggaaatatcagaagcacgaatcctttgtatcagaggtgcaagccaaatcaagagtccttcctgagctggaggaaatcagggaagctcgatttgcagaagaccattttgcccatgaagccaccaagacccatctgaagcaacttcgcctgctgtgggatctgctcttggagttgacccaagagaaaagtgacgtgctgctgcgggcactgaagttctatcaatattctcaggagtgtgaagacatcctagagtgggtcaaagagaaggaagctatagtgacattagtggagctgggcgatgactgggagcgaactgaggtcctgcataagaagtttgaagaattccaggaagaactgaccgctcggaagggaaaagtggacagagtgaaccaatatgctaatgagtgtgcccaggagaaacatcctaagttaccagagataaaggcaaaacaggatgaagtcaatgctgcctgggatcgtctctggagcctggctctcaagagacgagaaagtctgtctaatgcagcagacctccagcgatttaaaagggatgtcaatgaagctatccagtggatggaggagaaggagccgcagctcacctctgaggactatggcaaagatcttgttagttctgaggcattgtttcacaatcacaagaggctcgagaggaatctcgcggtcatggatgacaaggtgaaggagttgtgtgccaaagcagacaagctgatgatttcccattctgcagatgcacctcagattcaacagatgaaattggatctagtctccaactgggaacgcatccgtgccttggccactaacagatatgcaaagctgaaggcttcttatgggtaccatcggttcttatctgactatgatgagctctcaggctggatgaaggaaaagactgctctgatcaatgctgatgagctgccaacagatgtggccagtggagaagccctgctagccaggcaccagcagcataagcatgagattgactcttatgatgatcgatttcaatctgctgatgcaactggtcaagaactcctggatggcaatcacgaagcttctgaggaaattcgagagaagatgacaatacttgccaatgactgggctgctctgctggaactgtgggacaagtgtcagcaccaataccgccaatgtctggatttccatctcttctaccgagacagtgaacaagtggatagttggatgagcagacaagaggctttcctggaaaatgaagacctggggaactcagtgggcagcgtggaagccctccttcagaagcatgatgactttgaagaagcgttcactgcccaggaagaaaagatcataaccttggatgagactgcaaccaagcttattgacaatgaccactatgactctgagaatatcgctgctattcgtgatgggcttttggccagacgtgatgccctgcgtgaaagggctgccactagaagaaaattgttggtagattcacaacttcttcaacaactgtatcaagactcagatgacctaaaaacctggatcaataagaagaaaaagttggctgatgatgacgattacaaggatgtgcagaacttgaagagccgggttcagaagcagcaggactttgaagaggaattggcagtgaatgagattatgctcaataacttggagaaaacaggccaggagatgattgaggatggtcactacgcctctgaggctgtggctgctcgcctgagtgaggttgccaacctctggaaggagttgctggaggcaacagcacaaaaagggactcagctgtatgaagctaaccagctgctacagtttgagaacaatgcagaagacctgaagcgctggctagaggaggtggagtggcaggttacctctgaggattatgggaaaggtctggctgatgtacagaatctactaagaaaacatggccttctagagtcagatgtgactgctcgtcagaatcaggtggacaccctcacagacatggcggcacactttgaagagataggccatcccgactctggggacatccgtgcaaggcaggaatccttgctttcccgttttgaggctctgaaggagccactggccattcggaagaagaagctcattgacctactcaagctacagcagatttgcagagactcggaagatgaggaggcgtggatccaggagactgagccctcagcagcttccactcatcttggaaaggacttggttgcagccaagaatcttctaaacagacatgaagtcatcctggcagacattgcgagtcatgaaccacggattcaagtaataacagagaggggaaacaaaatggtggaggaaggacacttcgctgcagaagacatagcatctagggttgaaagcttgaacaaaaatatggagtctctccatgctcgagctattagacgggagaatgatcttaaggccaatgtccagctccaacagtacctggcagatctgcatgaagcagaagcatggattaaagagaaagaacccattgtagacaacaaaaactatggagctgatgaagaagcagctggggcccttctcaagaagcatgaagccttcctggtggatctgaatgcatttgaaaacagcataaaggctctaagagatcaggcagaagtctgccagcaacagcaggcagcaccagtggacgaggctggtcgagaagctagggtcatagctttgtatgactttgaggctcgcagccgtagagaggtcagcatgaagaagaatgatgtcttaactctgctcagttccatcaacaaggactggtggaaggttgaagctgatgatcaccagggctttgtgccagcggtttatgtcaggaaactggcccccgatgagctaccaggtttcccacagcatcggcaagaggagccagtcaacatccctcagctccagcagcaggtcgagaccctgtaccactccctcctagatcgggcagaagagcgcagacgtcgcttgctgcagcgctacaatgagtttctgctggcctatgaggcaggagacatgttggagtggatccaagagaaaaagacagaaaacactggagtggaactggatgatgtttgggaactgcagaagaagtttgacgagttccagagggatctaaagagtaatgagcctcggctaaaggacatcaacaaagtggctgacgaactgctctttgaagagctcctaaccccagaaggagctcacattcgacaggagttgaacacccgctggaattccctgaagaggctggcagatgaacagtatcagctgctcagcagtgcacatgctgttgagatgtttcacagggaagcagatgatgtcaaggaacagattgataagaaatgccgggctctcaatgctgccgaccctggctctgacctgctcagtgtccaggccctccagaggcaacatgaagtctttgagagagacatcatccccctgggagaaaaggtgactacgctgggggagactgctgagcgtctctgtgaatcacacccagatgccactgaggacctacagaagcagagaacagagctgaatgaggcctgggacacacttcaaggtcttacaagtgatcggaaggagagtctgaatgaagcccataaattcttcctcttccttagcaaggccagtgatctagagaactggatcaaaaccattggcggtgtgatatcatcacctgagctggctgaggacttaactggcacagagatcttgctggagcgacaccaggagcatcacgatgacataaagagagaggaccctaccttccaggccttagaagactttggtacagaacttatagacagcggccaccgtaacagacgtgaaattgacaatactctccagaatattaattcaaagagagacaatttggaaaagagttgggaaaaccgcaagaagatgctagaccagtgcttagaactgcagttattccgaggaaagtgtgaccaggtcgagagctggatggtggcccgtgagaattccctgaggtcagacgacagggatcacttaaacagtctgcaggctttgatgaagaaacgggatgatttggacaaagcaatcactgcccaggaagggaagatttcggacctagagaacgttgccacaaggctcatagacaatgaccactatgccaaggaagagattgctgctcgcctccaacgtgtgctagacaggtggaaggctctcaaagaacagctgcttactgaactgggaaagctaggagactatgctgacctcaaacagttctatcgtgaccttgaggacctggaggaatggatcaatgagatgcttcccatagcctgtgatgaatcttataaagatcccactaacattcagaggaaatatctgaagcatcaagcctttgaaaatgaagtcaacggtcgtgctgagcaggtggatggggttatcaaccttgggaattccctgattgagcgcagagtgtgtgatggagatgaagagaacatgcaggagcaactggacaagctaaaggagaactgggattatctcctagagagaaccactgacaaaggacagaagctcaacgaggccagtcggcagcaaaggttcaacacaagcatccgggactttgagttctggctttcagaggcagaaggcttgttggccatgaaggatcaggccagggacttaacttcagcaggaaacctacttaagaagcatcagctattggaagcagagatgttggcacgagaggaccctctcaaagatctgaatgacctggctcaggagctgatctccagtgggactttcaacattgaccagatagaagagaaaatgaatggtgtcaatgagcgctttgaaaatgtccagagcttggcagctgcacaccacgagaagctgaaagagacgtatgccttgttccagttcttccaagacctggatgatgaggaagcctggatagaggagaagttgttacgagtgagctcccaggactatgggagggatcttcagagtgttcagaacttattgaaaaaacacaaacgcctagagggggagctagtggcacatgaacctgctgtccagaatgtgctggatacggcagaaagcctgagagacaaggctgctgtagggaaagaggagatccaggagcggctggctcagtttgtccaacactgggaaaagctcaaagagttggcgaagacccgaggggtgaacttggaggagtccctcgagtatctgcagttcatggagaatgcagaagaagaggaagcatggctgggggagaagtgtgctctggtcagtcgcggggattcaggagacacactggctgctactcagagtttgctaaagaagcatgaagctttggagaatgactttgctgtgcacaagaaccgggtacaagatgtttgtgcacaaggagaagacattcttaataaggaagaaactcagaacaaggataagatttccaccaagatccaagttctgaatgaaaagacagcctctttggccaaggcattagctgcttggaagtcacaactggacgatgtgcatgcctttcagcagtttaactggaaggcggacgtagtggaatcctggataggtgagaaagaagcaagcctgaagaccaagagcaacggtgcagacctcaccgccttcctcacactactggcaaagcacgacacactggatgccagtcttcagagcttccagcaagaaaggctttctgaaatcgctgagctgaaggaccagcttgtggctggtgagcacagccaagccaaagccattgaggagcagcatgcagccttgctgaggcactgggaacaactgctggaggcatctagagttcacaggcagaaactgctggaaaagcagctgcctctacagaaggctgaggagctattcatggaatttgcacacaaagcttcagccttcaacaactggtgtgagaacgcggaagaggacttgtcagaacctgtgcattgtgtctctctaaatgagatccggcagctgcagaaggaacatgaagccttcttggcctctctggctggggctcaagaggatttcaactatttgttggagctagacaagcaaattaaagccttaaatgtcccctccagtccttatacctggttaacagtggatgtgctgggcagaatctggaaccacctgccagacatcatcaaggaaagggaacaggaactacagaaagaagaggctaggcagatcaagaactttgaaatgtgccaggagtttgaacaaaatgccagtgccttccttcagtggatccaggagaccagggcctattttctggatggatcattgctcaaggaaacaggaactctggaatcccaacttgaagcaaataaaaggaaacagaaggagatccaggcaatgaagcgccatctgaccaagattgaagacctgggggacagcatggaagaggctctgatccttgatatcaaatacagcaccattggactggcccagcaatgggatcagctgcaccaactagggatgcgaatgcaacacaatttggagcaacagattcaagccaaagacaccataggtgtgagtgaggagacattgaaagaatttagcaccacatacaaacacttcgatgagaacttgacagggcgattgactcacaaagagttccgctcttgcctgagaggactcaattactatctgcctatggtagaggaaggtgaacctgagcccaagtttgagaaattcctgaatgctgtggatccagggaggaaaggatatgtttcactggaagactatacatcattcctgattgacaaggagtcagagaatatcaagaccagcgatgacatagagagtgcattccaagctctggcagaaggcaaggcctatattaccaaggaggacatgaaacaggctctcaccccggaacaagtgtcattctgtaccatacatatgcagcaatatatggatccacggggtcggagccaacctgctggctacgactatgttggcttcaccaattcattctttggcaattga

SEQ ID NO: 90 - DNA, 7437 bp, Mus musculus
atggatccaagtggggtcaaagtgctggaaacagccgaggacatccaggagagacgacagcaagtcctggatcggtaccaccgcttcaaggagctctctaccttacggcgtcagaagctggaggattcctatcggttccagttttttcaaagagatgctgaggagttggagaagtggattcaggagaagcttcaagttgcatctgatgagaactacaaagacccaaccaacttgcagggaaagctgcagaagcaccaagcctttgaagctgaagtacaggctaactcaggagccattgtgaagctggacgagacaggaaacttgatgatttctgaagggcactttgcatctgaaaccatccggacacgtttaatggagctgcaccggcagtgggaactgcttttggagaagatgcgggagaaaggaatcaaactgctgcaggcacagaagctggtgcagtatttgcgggagtgtgaggatgtaatggactggatcaatgacaaggaagcaattgtgacttctgaggagctgggccaggacctggagcatgtagaggtgctacagaagaagtttgaagagtttcagactgatctggctgctcatgaagaaagagttaatgaagtgagccagtttgctgccaaactcatccaggagcagcacccggaagaggagctgatcaagaccaagcaggatgaggtgaatgcagcatggcagcgactgaaaggcctggctcttcaaaggcagggcaagctgttcggtgctgctgaggtccagcgctttaacagggatgtagatgagaccattggttggattaaggagaaagagcagttaatggcctctgatgacttcggcagagacttagcaagtgttcaagctctgcttcgaaagcatgagggtctggagagagatcttgctgctctagaggacaaggtgaaagccctgtgtgctgaggctgaccgcctgcaacagtcacaccctctgagtgccagccagatccaggtgaagcgagaggagctgattaccaactgggaacagatccgaactctggcagcagagagacatgcacggcttgatgactcgtacaggcttcagcgctttcttgctgacttccgtgacctcacaagctgggtaactgaaatgaaagccctcatcaatgcagatgaactggccaatgatgtggctggtgctgaagccctgctggacaggcatcaagagcacaagggtgagatcgacgctcatgaagatagctttaagtctgcagatgagtctgggcaagctctgcttgcggctagtcactatgcctcagatgaagtgagggagaagctgagcatcctctccgaggagagaactgccctgctggagctgtgggagcttcggaggcagcagtatgagcagtgcatggacttgcagctcttctaccgtgacactgagcaggtggacaactggatgagcaagcaggaggcattcctgctaaatgaagacttgggtgactccttagacagtgtggaagctcttttgaagaagcatgaggactttgaaaaatctctcagtgcccaggaagaaaaaatcacagcccttgatgaatttgcaaccaaactcatccaaaataaccactacgcaatggaagatgtagcgactcgacgagatgctctcctgagccgccgcaatgcccttcatgagcgagccatgcatcgccgggcacagctggctgattccttccatctgcagcagttcttccgtgattctgatgagctcaaaagttgggtcaacgagaagatgaaaacggccaccgatgaagcttataaagatccatccaacctgcaagggaaagtccaaaagcatcaggcttttgaggctgagctttcagcaaaccagagccggattgatgcccttgagaaagctgggcagaagctaatagatgtcaaccactatgccaaggaagaagtagcagctcgtatgaatgaggtcatcagtttgtggaagaaacttctagaggccacagaactgaaaggaataaagctccgagaagccaaccagcagcaacaatttaatcgaaatgttgaagacattgaattgtggctgtatgaagtagaaggtcatttggcttcagatgattatggtaaagacctcactaatgtccagaacctccagaagaagcatgctctgctagaggcggatgttgctgctcaccaggatcgaattgatggcatcacaattcaggcccgccagttccaagatgctggccattttgatgccgaaaatattaagaagaagcaagaggcccttgtggctcgctatgaggctcttaaggaacccatggtggcccggaaacagaagctggcagattctcttcgtctgcagcagctcttccgggatgtggaggacgaagaaacctggattcgagaaaaggagcctattgctgcatccactaacagaggcaaagatcttattggagtccagaatctgctaaagaaacaccaagctttgcaagcagagattgctgggcatgaacctcgaatcaaagcagtgacacaaaagggaaatgccatggtggaggaaggccattttgctgcagaggatgtgaaggccaaactgagtgagctcaaccagaagtgggaggctctgaaagccaaagcctcccagcggaggcaggatctagaggactcgctgcaggcccagcagtactttgccgatgccaatgaggctgagtcctggatgcgggagaaggagcccattgtgggcagtacggactatgggaaggatgaagactctgctgaggctctactcaagaagcatgaagctttgatgtccgatctcagcgcctatggcagcagcatccaggctctgcgagaacaggcccagtcatgccggcaacaagtggcccccatggatgatgagactgggaaggagctagtcttggctctctatgactatcaagagaagagtcctcgtgaggtcaccatgaagaaaggggatatcctcaccttgctcaacagcacaaacaaggattggtggaaagtggaagtgaatgaccggcagggtttcgtgccagctgcatatgtgaagaagctggaccccgcccagtcagcctcgagggagaacctcctagaagagcagggcagcattgctctgcggcaggggcaaattgacaaccaatatcagtctctgctggaactgggtgagaagagaaaaggcatgttggagaagagttgcaagaagttcatgttgttccgggaagcaaacgagttacagcagtggatcactgagaaggaggctgctctaaccaatgaggaggttggcgctgacttggagcaggttgaggtgctgcagaagaagtttgatgacttccagaaggatctgaaagccaatgagtctcggctgaaggacattaacaaagtagcagaagacctggagtctgaaggtctgatggcagaggaagtgcaagctgtgcagcagcaggaggtgtatggtgcgatgcccagggatgaagcagattccaagacggcctccccatggaagtctgctcgactgatggtccatacagtggctaccttcaactccatcaaggagctgaatgagcgttggcggtccctgcaacagctggctgaggaacgtagccagctcttgggcagtgcacacgaagtacagaggtttcacagagatgctgatgaaactaaagaatggattgaagagaagaatcaggctctgaacacagacaactatggccatgatttagctagtgtccaggccctgcagcgcaaacatgaaggctttgagagggaccttgcagctcttggtgacaaggtgaattcccttggggaaacagcccaaaggctgatccagtcccaccctgaatctgcagaggacttaaaggaaaagtgcacagagttaaaccaggcctggaccagcctagggaagcgtgcagaccagcgcaaggccaaattgggtgactcccatgatctgcagcgcttccttagcgatttccgggacctcatgtcttggatcaatggaatacgagggttggtatcttcagatgaactagccaaggacgtcactggagctgaggctttgctggagcgacaccaggaacaccggacagaaattgatgccagggctggcactttccaggcatttgagcagtttgggcagcagctgttagctcacgggcactatgccagcccggagatcaaagagaaacttgatattcttgaccaggagcgcacagacctggagaaggcctgggtccagcgcaggatgatgctggaccactgcctggagttgcagctgttccatcgggactgtgaacaagcagaaaactggatggctgcccgggaggccttcctaaacacagaagacaaaggagactcgctggacagtgtggaggcactgatcaaaaaacatgaagactttgacaaagctatcaatgtccaggaagaaaagatagctgccctgcaggcctttgccgaccagctcattgccgttgaccactatgccaagggagacattgcaaaccgacgcaatgaggtccttgaccggtggcgccgcctaaaagcccagatgattgaaaaaaggtcaaaacttggagaatctcaaacacttcagcagttcagccgggatgtggatgagattgaagcctggatcagtgagaagttacagacagccagtgatgagtcatacaaggaccccaccaacatccagctttccaagctgttgagcaagcaccagaagcaccaagcctttgaggcagaactgcacgccaatgctgaccgaatccgtggagttatcgacatgggcaactccctcattgagcgtggggcctgtgctggcagtgaggatgctgtcaaggcccgcctggctgcccttgcagaccagtggcagttcctggtgcagaaatcagctgagaagagccagaagctaaaagaggcaaataagcagcagaacttcaacactggaatcaaagactttgacttctggctctctgaggtggaggctctcctggcatcggaagattatggcaaagacctggcttctgtgaacaacttgctgaaaaagcatcagctgctagaggcagacatctcggcccacgaggatcgtctgaaggacctgaacagccaggctgacagcctgatgactagcagtgccttcgacacctcccaagtgaaagagaagcgggacaccatcaatggacgcttccagaagatcaagagcatggccacctcccgaagagcgaaactgagcgagtcccaccgcctgcaccagttcttccgggacatggacgacgaggagtcctggatcaaggagaagaagttgttagtgagctctgaggactatggcagagacctcactggtgttcagaatctgaggaagaaacacaagcggctagaagctgaactggctgcacatgaacccgccattcagggtgtcctggacactgggaagaagctgtctgatgacaacaccatcgggcaggaggagatccagcaacggcttgcacagtttgtggagcactggaaggaactaaagcagctggcggctgcgcggggccagcggctagaggagtccttggagtatcagcagtttgtagccaacgtggaagaggaggaggcttggatcaatgagaagatgactctggtggccagcgaagactatggagacactcttgctgctatccagggcttactgaagaaacacgaagcttttgagacagacttcactgtccacaaggatcgggtgaatgatgtctgtactaatggacaagacctcattaagaagaacaatcaccatgaggagaacatctcttcaaagatgaagggtctgaatggaaaggtgtctgatctggagaaagcagcagctcagaggaaagcaaagctggatgagaactcagccttccttcagttcaactggaaggctgacgtggtagagtcctggattggtgaaaaggagaacagcttgaaaacagatgactatggccgagatctgtcttctgtccaaactctgctcacaaaacaggagacatttgatgctggcctgcaggccttccagcaggagggtattgccaatatcactgccctcaaagaccagctgctagctgccaagcacattcagtctaaggccatcgaggcccgacatgcctccctcatgaagaggtggacccagctgttggccaattcagctacccggaagaagaagttgctggaggcccagagtcatttccgtaaggtagaagacctcttcctgacctttgccaaaaaggcatcggctttcaatagctggtttgagaatgcagaggaagacctcacagacccagtgcgctgcaactctctggaagaaatcaaagcccttcgagaggctcacgatgccttccgctcatccctcagctctgcacaggctgacttcaaccagctagccgagctggaccgccagatcaagagtttccgggtggcctccaacccctatacctggttcacgatggaggccctggaagagacctggagaaacctccagaagatcattaaggaacgagaactggagctgcagaaggaacagcggcggcaggaggagaatgacaagctgcgccaagaatttgcccagcatgccaacgccttccaccagtggatccaggaaacaagaacgtatctcctcgacggcatagcatatcgtcgggtcattcgtgtctgtcagtatgaagttggggatgatctgtctggaaggtcctgcatggtggaagagtcgggaactctggaatctcagcttgaagctaccaaacgcaagcaccaggagattcgagccatgagaagtcagctgaagaagatcgaggacctgggggctgccatggaggaagccctcatcctggacaacaagtacacggagcacagcactgtgggcctggcccagcagtgggaccagttagaccagctgggcatgcgcatgcagcacaacctggagcagcagatccaggccaggaacacaacaggagtgactgaggaggccctcaaggaattcagcatgatgttcaaacacttcgacaaggacaagtctggccggctgaaccatcaggagttcaaatcctgtcttcgctccctgggctatgatctgccaatggttgaggaaggagagcctgatcctgagtttgaggcaattctggacactgttgatcccaacagggatggccacgtctccctgcaagaatacatggctttcatgatcagccgcgaaacggagaatgtcaagtccagtgaagagatcgagagtgctttccgggccctcagctctgagggcaagccttatgtgaccaaggaggagctctaccagaacctgacccgggaacaagctgactattgtgtctcccacatgaagccctatgtggatggcaagggccgagaacttccaactgccttcgactacgtcgagttcacccgctcactctttgtgaattga

SEQ ID NO: 91 - DNA, 6990 bp, Mus musculus
atgacatcggccacggagtttgaaaacgtgggcaaccagccaccattcagccggattaacgcccgctgggatgcccccgatgacgaactggataatgacaacagctcagccaggctctttgagaggtcacggatcaaggccttggcagatgagcgggaagtggtccagaagaaaacctttacgaaatgggtgaactcccacctggctcgagtgtcctgccgcatcagcgacctctacaaggacctgcgggacggacggatgctcatcaagctgctggaggtgctctctggagagatgctgccaaggccgaccaagggcaagatgcgcatccactgcctggagaacgtggacaaagccctgcagttcctcaaggaacagcgcgtgcacctggaaaacatgggctcccacgacattgtggatggtaaccaccgcctggtcctgggcctcatctggaccatcatccttcgattccagattcaggacattgttgtccaaactcaagaaggtcgggagacacgctcagccaaggatgctctgctcctgtggtgccagatgaagacagcaggctacccccatgtcaatgtaaccaacttcacctccagctggaaggatggcctggccttcaatgccctaatacacaaacaccggcctgacctcatcgactttgacaagctgaaggactccaatgcccggcataacctggagcatgcttttgatgtagccgagcgccagctcggcattatcccactccttgaccccgaagatgtcttcacagaaaaccccgatgagaaatccatcatcacctacgtggtggcgttttatcactacttctccaagatgaaggtgctggcggtggagggcaagcgagttggcaaggtcatcgaccacgccatcgagaccgagaagatgattgaaaagtacagtgggctagcctcagacctgctcacttggattgaacaaaccattagcgtcctaaacagccgcaagtttgccaactcgttgagtggcgtccagcagcagctacaggccttcagcacctaccgtactgtggagaagccacccaagtttcaggagaaggggaatctggaagtcctcctattcactatccaatcccggatgagagccaacaatcagaaggtgtacacgccccacgatgggaagctggtgtctgacatcaacagggcctgggagagcctggaggaagcagagtaccaaagggagctggctctgaggagcgagctcattcggcaggagaagctggagcagctggcgcggcgcttcgaccggaaggctgccatgagagagacgtggctcaatgaaaaccagcgcctggtgacccaggataactttgggtatgacctggcagctgtggaggccgccaagaagaagcacgaagccattgagaccgacacagctgcctatgaggagcgggtaaaggcgctggaggacctggcccaggagctggagaaggagaattaccatgaccagaagcgtatcattgcccggaaggacaacatcctccgtctgtggagctacctgcaggagctgctgcgatcccggcgacagaggctggaggccaccctggcactgcagaaactctttcaggacatgctgcacagcatcgattggatggatgagatcaaggctcacatcttgtctgctgaatttgggaagcacttgttagaggttgaagacctgctgcagaagcacaagctaatggaggccgacattgccatccaaggggacaaagtgaaggccatcacagcggccaccctgcagttcgctgaggggaaagggtatcaaccttgtgacccccaggtcatccaggaccgtgtcagccacctagagcagtgcttcagtgaactgagcaacatggcagctggacggaaggctcagctggagcagtctaagcgactctggaagttcttctgggagatggatgaggccgaaagctggatcaaggagaaggagcagatctactcctccctggactacggcaaggacctgaccagcgtgctcatcttacagcgcaagcacaaggcctttgaggatgagctccgtgggctggacgcccatctgaaacagatcttccaggaggctgacgacatggttgcacaaaagcagtttggacacccacagatcgagacccgtgtcaaagaagtgtcagctcagtgggaccacctgaaggagctggctgcctttcgtaagaaagacctgcaggatgcggaaaacttcttccagttccagggtgatgcagacgacctgaaggcttggctgcaagacgctcaccggctgctctctggtgaagatgtagggcaagatgaaggagccacgagggccctgggaaagaagcacaaggagttcctggaggagctggaggagagccgaggggtgatggagcacttggagcaccaagcccagggcttccccgaggagtttcgagattccccagatgtaacaaaccgactccaggcactcaggaagctctaccagcaggtactgacccaggcagaattgcgtggacacaagctgcaggaagccctggacttgtacaccgtgtttggggagtcagatgcctgtgagctgtggatgacggagaaggggaagtggctggaccagatggatatcccaaacacgctggaggatctggaggtggtgcagcacaggtttgacatcctggaccaggagatgaagaccttgatggcgcagattgatggagtgaaccttgccgccaacaacctggtagagagtggccacccacgaagtggggaggtgaagcaatatcaggaccgcctgaacaagaggtggcaggccttccaggcagtggtgtcagagcagagagaggctgtggactcagctctccgagtaaacaattactgtgtagactgtgaggagaccagcaagtggatcatggacaagacgaaggttgtggagtcaaccaaggacttgggacaggacctggcaggtgtaattgccatccagcggaagttgtcagggttggagcgggatgtattggccatccgggatcgtgtgagtgccctggaacgggagtcccagtacttgatggagtcacaccctgagcagaaagaggacattggccagcggcaagcagatgttgagaagctgtggaagggcctgcaagatgccttgcaaggtcaggagctctccttaggcgaggccagcaagctgcaggctttcctgcaagatctggatgacttcaaggcctggctgtccatggcccaaaaggcagtggcctccgaggacatgcctgagtcactcccagaggcggagcagctcctacagcagcatgcagccattaaggaagagattgatgcgcacagagacgattaccatagggtcaaggcctctggggagaaagtgatcgaaggccagaccgacccagattaccagcttctgggccagcggttagagggcctagatactgactgggatgctctacgccggatgtgggagagccgagggaacacgctcacccagtgcctgggctttcaggagttccagaaagatgccaagcaggctgaagccatcctcagcaaccaggaatacactctggctcacttggagcctccggactccctagcggcagcagaggcgggcatccgaaagtttgaggatttcctagtatctatggaaaacaaccgagacaagatcctgagtcctgtggactctggcaacaagctggtggccgagggcaacctgtattcgaacaagatcatggagaaggtgcagctgattgaagacaggcacaagaagaacaatgagaaggcccaggaggctacagttctcctaaaagacaacctggagttgcagaacttcctccagaactgcaaggagctcactctctggatcaatgacaagctgctgacgtctccagacgtctcctatgatgaagctcgcaaccttcacaacaaatggatgaaacaccaggcgtttatggcagaactggcttcacaccaagggtggcttgagaacattgacgcagaggggaggcagctgatggcagagaagccccagttcaaggatgtggtatcagagaggctggaagccctgcacaagctctgggaggagctgcagtccaccgccaaggcgaaggcagaacaactctcagccgcgcggagctctgacctgcgcctgcagacccacgccgaccttaacaaatggatcggtgccatggaggaccagctgcgatcagacgacctgggcaaggatctcaccactgtcaaccggatgttggctaagttgaagcgagtggaggaacaagtgaatttgcggaaggaggagctggaggaactctttgccgacgcgccctcgctaggagcggaggcaggagacacggacatgagcatcgaaaagcggttcctagaccttctagaacctctggggaggaggaagaagcagctggaattgtccaaagccaagctacaaatcagccgggacttagaggatgagacgctctgggtggaagagaggctgccactggctcagtcagctgactatggcactaatctgcaaactgtgcagctgttcatgaagaagaaccagaccctgcagaatgagattctcggccatgcgccacgggtggaggatgtgctacgtcgagggcaggagctggtgaaggcagccgagatcgactgccaagacatcgaggagcgcctggggcatctgcagagctcgtgggacacgctgcgggaggcagcagctggccggctgcagcgcctgcgggatgctcacgaggcacagcagtactacctggatgcaggcgaggccgaagcctggatcagcgagcaggagctatatgtgttctctgatgaaccccctaaggatgaagagggagccattgtgatgctcaaacggcacctgcggcagcagcgcactgtggaggagtatggacggaatatcaaacagctggctggccgtgcccagagcctgctatctgcaggccaccctgagggggaacagatcatcagactccaggggcaggtggataagcagtacgcggggctgaaggacatggctgaagagcggaggcggaggctggagaacatgtaccacctgttccagctgaagagagaggctgacgacttagagcagtggattacggaaaaagagatggtggcctcgtcccaagaaatggggcaggattttgaccacgtgactatgctacgtgacaagttccgagactttgcccgggagaccggggccatcgggcaggagcgagtggacaacgtgaatacgatcattgagcggctcatcgatgcgggccacagcgaggcggccaccatcgctgagtggaaggatggactcaatgacatgtgggcggacctgctggagctcattgacacccgcatgcagctgctggctgcctcctacgacctgcaccgctatttctacacaggcaccgagatcctgggcctcatagatgagaagcacagagagctgccggaggacgtggggctggacgccagcactgctgagtccttccaccgggtccacactgccttcgagcgggaactccacctcctaggagtgcaggtacagcagttccaggacgtggccacccgactgcagacagcgtatgccggggagaaggcagatgctatccagagcaaagagcaggaggtgtcagcggcctggcaggcactgctcgatgcgtgtgccgggcgccgagctcagctggtggacacagcagacaagttccgcttcttcagcatggtgcgagacctcctctcctggatggagagcatcatcaggcagatcgagacccaggagagacccagggatgtttcctctgtggaattgctcttgaagtatcatcagggcatcaaggcagagatcaataccagggccaagaacttcagcacctgcctagagcttggggagtccctgctacagaggcaacaccaggcctcggacgagatccgggagaaattgcagcaagtgatatccaggaggcaggagatgaatgacaagtgggaggcccgctctgacaggctccacatgcttctggaagtgtgccagttctcgagggatgcctctgtggccgaggcatggttgattgcccaggagccctacctggccagccgggactttggacatacagtggacagcgtagaaaagcttatcaagaggcacgaggcgtttgagaagtccacagccagctgggcagagcgctttgccgccctggagaagcccaccacgcttgagcttaaggaacgccagactccagaaagacccacagaggaacctgggcctcaagaggaggaaggcgagacagctggcgaggccccccaggtccaccatgcggccacagagagaacatctccgggggaagaaagaggaccatggcctcaggacctgcaaccaccacccctgccaggacaccacaaagacgagcaggagaaatccgttggggatgagaggcctgccacagagcccctctttaaagtcctggacacgcccctgagtgagggtgacgagcccacgaccctgccagcccagcgagacctcgggcacactgtgcagatggagggctacctgggccgaaagcacgacctagaggggcccaacaagaaggcctctaacaggtcctggaacaacctgtactgtgtgctcaggaatagtcagctgaccttctacaaggatgctaagaacctggcccttggggtgccctaccatggagaggagcccctggccctgaggcacgccatctgtgagattgctgtcaactataagaagaagaagcatgtgtttaagctgaggttaagcaatggcagcgagtggctcttccatggcaaggatgaggaggagatgctgatgtggctacagagcatgagcacggccatcaacgagtcccagagcatccgtgtcaaggctcagagtctgcctctgccttccctggctggtcctgatgccagcgttggcaagaaggaaaaggagaaaaggtttagcttcttccccaaaaagaagtag

SEQ ID NO: 92 - DNA, 7092 bp, Mus musculus
atgacgaccacggtagccacagactatgacaacattgagatccagcagcagtacagtgatgtgaacaaccgctgggatgtggatgactgggacaatgagaacagctctgcaaggctctttgagcgctcccgcatcaaggccctggcagatgagcgtgaagctgtacagaagaagaccttcaccaagtgggtcaattcccaccttgcgagagtgtcctgccgaatcacagacctgtacacggaccttcgagatggacggatgctcatcaagctactggaggtcctctctggagagaggctgcctaaacccactaagggacggatgcggatccactgtctggagaatgtcgacaaggctcttcaattcctgaaagagcagagagtccatcttgagaacatgggctcccatgacattgtggatggaaaccaccggctgaccctcggcctcatctggacaattattctgcgcttccagatccaggatattagtgtggagactgaagataacaaagagaaaaagtctgctaaggatgcattgctgctgtggtgccagatgaagacagctgggtaccccaatgtcaacattcacaatttcaccactagctggagggatggcatggccttcaatgcactgatacataaacatcggcctgacctgatagattttgataaactgaagaaatctaatgcacactacaatctgcagaatgcatttaacctggcagagcagcaccttggcctcactaaactgttagaccctgaagatatcagtgtggaccaccctgatgagaagtctatcatcacatacgtggtgacttactaccactacttctccaagatgaaggccttggctgtcgaaggaaagcgcattggaaaggtgcttgataatgctatagaaacagagaaaatgattgagaagtacgagtcacttgcttctgaccttctggagtggattgaacaaaccatcatcatcctaaacaaccgcaaatttgctaattcactggttggggtccagcagcagctccaggcattcaacacgtaccgcacagtggagaaaccacctaagtttactgagaaggggaatttggaggtgctccttttcacaattcagagcaagatgcgagcgaataatcagaaggtctacatgccccgcgaggggaagctcatctctgacatcaacaaggcctgggaaagactggaaaaagcagaacatgagagagaactggctctgcggaatgagctcatacggcaggaaaaactggaacaactcgcccgaagatttgatcgcaaggcagctatgagggagacatggctgagtgaaaaccagcgtcttgtgtctcaggacaactttggatttgaccttcccgctgttgaggctgctaccaaaaaacacgaggccattgagacagacatcgctgcatatgaagaacgagttcaggccgtggtggctgtggccagggaacttgaagccgagaactaccatgacatcaagcgcatcacagcgaggaaggacaatgtcatccggctctgggaatacttgctggaactgctcagggccaggaggcagcgtcttgagatgaacctgggattgcaaaagatattccaggaaatgctttatattatggactggatggatgaaatgaaggtgctattgctgtctcaagactatggcaaacacttacttggtgttgaagacctgttacagaagcatgccctggttgaagcagacattgcaatccaagcagagcgtgtaagaggtgtgaatgcctctgcccagaagtttgcaacagatggggaaggctacaagccatgtgacccccaggtaattcgagaccgtgttgcccacatggagttctgctatcaagagctttgtcagctggctgccgagcgtagggctcgcctggaagagtcccgtcgcctctggaagttcttctgggagatggcagaagaggaaggctggatacgagagaaggagaagatcctgtcctctgatgattacgggaaagacttgaccagtgtcatgcgcctgctgagcaagcaccgggcatttgaggatgagatgagtggccgtagtggccattttgagcaggccattaaagaaggtgaagacatgattgcagaggaacactttggatcggaaaagatccgtgagagaatcatttatatccgggagcagtgggccaacctggaacagctctcagccattaggaagaagcgcctagaggaagcctcattactgcaccagttccaggctgatgctgatgatattgatgcttggatgttagatatactcaagattgtctccagcaatgatgtgggccatgatgagtactccacgcagtctctggtcaagaagcataaagatgtagcagaagagatcaccaactacaggcccactattgacacactgcatgagcaagccagtgcccttccacaagcacatgcagagtctccagatgtgaagggccggctggcaggaattgaggagcgctgcaaggagatggcagagttaacacggctaaggaagcaggctctgcaggacaccctggccctgtacaagatgttcagtgaggctgatgcctgtgagctctggattgacgagaaggagcagtggctcaacaacatgcagatcccagagaagctggaggacctggaagtcatccagcacagatttgagagcctagaaccagaaatgaacaaccaggcttcccgggttgctgtggtgaaccagattgcacggcagctgatgcacaatggccaccccagtgaaaaggaaatcagagctcagcaagacaaactcaacacgaggtggagtcagttcagagaactggtggacaggaaaaaggatgctcttctgtctgccctgagcatccagaactaccacctcgagtgcaatgaaaccaaatcctggatccgggagaagaccaaggtcatcgagtctacccaagaccttggcaatgacctggcaggtgtcatggccctgcagcgcaagctgactggcatggaacgagacttggtagccattgaggcgaagctgagtgacctgcagaaagaagctgagaagctggagtccgagcaccctgaccaggctcaagctatcctgtctcggctggccgagatcagtgatgtgtgggaggaaatgaagacaaccctgaagaaccgagaggcctccctgggagaggccagcaagctgcagcagtttctgcgggacttggacgacttccagtcttggctctccaggacccagactgctatcgcctcagaggacatgcccaataccctcactgaggcagagaagcttctcacacagcacgagaatatcaaaaatgagatcgacaattatgaggaagactaccagaagatgcgggacatgggcgagatggtcacccaggggcagactgatgcccagtatatgtttctgcggcagcggctgcaggccttagacactggctggaatgagctccacaaaatgtgggagaacaggcaaaacctcctctcccagtcccatgcctaccagcagttccttagggacaccaaacaagctgaagcttttcttaataaccaggagtatgttttggctcatactgaaatgcccaccaccctggaaggagctgaagcagccattaaaaagcaggaggacttcatgaccaccatggatgccaacgaggagaagatcaatgctgttgtggagactggccgaagactggtgagcgatgggaacatcaactccgaccgcatccaggagaaggtggactctattgacgacagacacaggaagaatcgagaagcagccagtgaacttctgatgaggttaaaggacaaccgtgatctacagaagttcctgcaagattgtcaagagctgtccctctggatcaatgaaaagatgcttacagctcaagacatgtcttatgatgaagccagaaatctgcacagtaaatggttaaagcatcaagcatttatggcggaacttgcatccaacaaagaatggcttgacaaaattgagaaggaaggaatgcagcttatttcagaaaagccagaaacagaagctgtggtaaaggaaaaactcactggtttacataaaatgtgggaagtccttgaatccacaacccagaccaaggcccagcggctctttgatgcaaataaggctgagcttttcacacaaagctgcgcagatcttgacaaatggctacatggcctggagagccagattcaatctgacgactatggcaaagaccttaccagtgtcaatattcttctgaaaaagcaacagatgctggagaatcagatggaagttcggaagaaagagatcgaggaactgcagagccaagcccaggcgctgagtcaggaggggaagagcacagatgaggtggacagcaaacgccttactgtgcagaccaagttcatggagcttctggagcccttgagtgagaggaagcataacctgttagcttccaaggagatccatcagttcaacagggatgtggaggacgaaatcctatgggttggcgagaggatgcctttggcaacttccacagatcatggccataaccttcaaactgtgcagctgttaataaagaaaaaccagaccctccagaaagaaatccagggacaccagcctcgtattgatgacatctttgagaggagtcaaaacatcatcacagatagcagcagcctcaatgccgaggctatcaggcagaggctcgctgacctgaagcagctgtgggggctcctcattgaggaaactgagaaacgccatagacggctggaggaggcacacaaggcgcagcagtactactttgatgcagctgaagccgaggcatggatgagtgaacaggagttgtacatgatgtctgaggaaaaggccaaggatgagcagagtgctgtctctatgttgaaaaagcaccagattttagagcaagctgttgaggactatgcagagacagtacaccagctctccaagactagccgggcgctggtggctgacagccatcccgaaagtgagcgtattagcatgcggcagtcaaaggtcgacaagctgtatgctggcctgaaggaccttgctgaggagaggagaggaaaacttgatgagaggcacaggctgttccagctcaacagagaggtggatgacctggaacagtggatcgctgagagggaagtggtcgcaggctcccatgagttgggacaggactatgagcatgtcacgatgttacaagaacggttccgagaatttgctcgagacacaggaaacattgggcaggagcgtgtggatacagttaataacatggcagatgaactcatcaactctggacattcagatgctgccaccattgctgagtggaaagatggtctcaatgaagcctgggctgacctcctggagctcattgacacaagaacacagattcttgctgcctcatatgaacttcataagttttaccatgatgccaaggagatctttggccgaatccaggacaaacacaagaaactccctgaggagcttggaagagatcaaaacactgtggaaactttacagagaatgcacaccacctttgagcacgacatccaagctctgggcactcaggtgaggcagctgcaggaggatgcagctcgcctccaggcagcctatgcaggggacaaggctgatgacatccagaagcgtgagaatgaggtcctggaagcctggaagtccctgctggatgcttgtgagggtcgcagggtgcggctggtagacacaggagacaagttccgcttcttcagcatggtgcgtgacctcatgctctggatggaagatgtcatccggcagatcgaggcccaggagaaaccacgggatgtgtcatctgttgaactgttaatgaataatcatcaaggtatcaaagctgaaattgatgctcgtaatgacagctttacagcctgcattgagcttgggaaatccctgctggcacggaaacactatgcttctgaggagatcaaggaaaagttactgcagctgacagagaaaagaaaagaaatgattgacaagtgggaagaccggtgggagtggttaagactgattttggaggtccatcagttctcaagggatgccagtgtggcagaggcttggctgcttggacaggaaccatacctatccagccgtgaaattggccagagtgtagacgaagtggagaagcttattaagcgccatgaggcgtttgaaaagtctgcagcgacctgggatgagagattctctgctctggaaaggctgacaacgttggagctactggaagtgcgcagacagcaagaggaagaagaaagaaagaggcggccaccttctccggacccaaacacgaaggtttcagaggaggctgagtcccagcaatgggatacttcaaaaggagaccaagtttcccagaatggtttgccggctgagcagggatctccacggatggcaggaaccatggaaacgagtgaaatggtcaacggtgctgctgagcagaggacaagctccaaagagtccagtcctgttccctctcccaccttggaccgaaaggccaaatctgcacttccagcccagagtgctgccaccctgccagccaggaccctggagacacccgctgcccagatggaaggcttcctcaatcggaagcatgagtgggaggcccacaataagaaagcctcgagcaggtcctggcacaatgtatattgtgtcataaataaccaagaaatgggcttctataaagatgccaagagtgctgcttctggcatcccctaccacagtgaggtccctgtgagtttgaaagaggccatctgcgaagtggcccttgattacaaaaagaagaagcacgtgttcaagctaagactaagtgatggaaacgagtacctcttccaagccaaagatgatgaggaaatgaacacatggatccaggctatctcctctgccatctcctctgacaaacacgacacatctgccagcacccagagtacgccagcatccagtcgggcgcagaccttacccaccagcgtcgtcaccatcaccagcgagtccagtcctggcaagagggagaaggataaagagaaagacaaagagaagaggttcagccttttcggcaagaagaagtga

SEQ ID NO: 93 - DNA, 6465 bp, Mus musculus
atggagttgcagaggacatccagcatttcagggccgctgtcgccggcctacaccgggcaggtgccttacaactacaaccaactggaaggaagattcaaacagctccaagatgagcgtgaagctgtacagaagaagaccttcaccaagtgggtcaattcccaccttgcgagagtgtcctgccgaatcacagacctgtacacggaccttcgagatggacggatgctcatcaagctactggaggtcctctctggagagaggctgcctaaacccactaagggacggatgcggatccactgtctggagaatgtcgacaaggctcttcaattcctgaaagagcagagagtccatcttgagaacatgggctcccatgacattgtggatggaaaccaccggctgaccctcggcctcatctggacaattattctgcgcttccagatccaggatattagtgtggagactgaagataacaaagagaaaaagtctgctaaggatgcattgctgctgtggtgccagatgaagacagctgggtaccccaatgtcaacattcacaatttcaccactagctggagggatggcatggccttcaatgcactgatacataaacatcggcctgacctgatagattttgataaactgaagaaatctaatgcacactacaatctgcagaatgcatttaacctggcagagcagcaccttggcctcactaaactgttagaccctgaagatatcagtgtggaccaccctgatgagaagtctatcatcacatacgtggtgacttactaccactacttctccaagatgaaggccttggctgtcgaaggaaagcgcattggaaaggtgcttgataatgctatagaaacagagaaaatgattgagaagtacgagtcacttgcttctgaccttctggagtggattgaacaaaccatcatcatcctaaacaaccgcaaatttgctaattcactggttggggtccagcagcagctccaggcattcaacacgtaccgcacagtggagaaaccacctaagtttactgagaaggggaatttggaggtgctccttttcacaattcagagcaagatgcgagcgaataatcagaaggtctacatgccccgcgaggggaagctcatctctgacatcaacaaggcctgggaaagactggaaaaagcagaacatgagagagaactggctctgcggaatgagctcatacggcaggaaaaactggaacaactcgcccgaagatttgatcgcaaggcagctatgagggagacatggctgagtgaaaaccagcgtcttgtgtctcaggacaactttggatttgaccttcccgctgttgaggctgctaccaaaaaacacgaggccattgagacagacatcgctgcatatgaagaacgagttcaggccgtggtggctgtggccagggaacttgaagccgagaactaccatgacatcaagcgcatcacagcgaggaaggacaatgtcatccggctctgggaatacttgctggaactgctcagggccaggaggcagcgtcttgagatgaacctgggattgcaaaagatattccaggaaatgctttatattatggactggatggatgaaatgaaggtgctattgctgtctcaagactatggcaaacacttacttggtgttgaagacctgttacagaagcatgccctggttgaagcagacattgcaatccaagcagagcgtgtaagaggtgtgaatgcctctgcccagaagtttgcaacagatggggaaggctacaagccatgtgacccccaggtaattcgagaccgtgttgcccacatggagttctgctatcaagagctttgtcagctggctgccgagcgtagggctcgcctggaagagtcccgtcgcctctggaagttcttctgggagatggcagaagaggaaggctggatacgagagaaggagaagatcctgtcctctgatgattacgggaaagacttgaccagtgtcatgcgcctgctgagcaagcaccgggcatttgaggatgagatgagtggccgtagtggccattttgagcaggccattaaagaaggtgaagacatgattgcagaggaacactttggatcggaaaagatccgtgagagaatcatttatatccgggagcagtgggccaacctggaacagctctcagccattaggaagaagcgcctagaggaagcctcattactgcaccagttccaggctgatgctgatgatattgatgcttggatgttagatatactcaagattgtctccagcaatgatgtgggccatgatgagtactccacgcagtctctggtcaagaagcataaagatgtagcagaagagatcaccaactacaggcccactattgacacactgcatgagcaagccagtgcccttccacaagcacatgcagagtctccagatgtgaagggccggctggcaggaattgaggagcgctgcaaggagatggcagagttaacacggctaaggaagcaggctctgcaggacaccctggccctgtacaagatgttcagtgaggctgatgcctgtgagctctggattgacgagaaggagcagtggctcaacaacatgcagatcccagagaagctggaggacctggaagtcatccagcacagatttgagagcctagaaccagaaatgaacaaccaggcttcccgggttgctgtggtgaaccagattgcacggcagctgatgcacaatggccaccccagtgaaaaggaaatcagagctcagcaagacaaactcaacacgaggtggagtcagttcagagaactggtggacaggaaaaaggatgctcttctgtctgccctgagcatccagaactaccacctcgagtgcaatgaaaccaaatcctggatccgggagaagaccaaggtcatcgagtctacccaagaccttggcaatgacctggcaggtgtcatggccctgcagcgcaagctgactggcatggaacgagacttggtagccattgaggcgaagctgagtgacctgcagaaagaagctgagaagctggagtccgagcaccctgaccaggctcaagctatcctgtctcggctggccgagatcagtgatgtgtgggaggaaatgaagacaaccctgaagaaccgagaggcctccctgggagaggccagcaagctgcagcagtttctgcgggacttggacgacttccagtcttggctctccaggacccagactgctatcgcctcagaggacatgcccaataccctcactgaggcagagaagcttctcacacagcacgagaatatcaaaaatgagatcgacaattatgaggaagactaccagaagatgcgggacatgggcgagatggtcacccaggggcagactgatgcccagtatatgtttctgcggcagcggctgcaggccttagacactggctggaatgagctccacaaaatgtgggagaacaggcaaaacctcctctcccagtcccatgcctaccagcagttccttagggacaccaaacaagctgaagcttttcttaataaccaggagtatgttttggctcatactgaaatgcccaccaccctggaaggagctgaagcagccattaaaaagcaggaggacttcatgaccaccatggatgccaacgaggagaagatcaatgctgttgtggagactggccgaagactggtgagcgatgggaacatcaactccgaccgcatccaggagaaggtggactctattgacgacagacacaggaagaatcgagaagcagccagtgaacttctgatgaggttaaaggacaaccgtgatctacagaagttcctgcaagattgtcaagagctgtccctctggatcaatgaaaagatgcttacagctcaagacatgtcttatgatgaagccagaaatctgcacagtaaatggttaaagcatcaagcatttatggcggaacttgcatccaacaaagaatggcttgacaaaattgagaaggaaggaatgcagcttatttcagaaaagccagaaacagaagctgtggtaaaggaaaaactcactggtttacataaaatgtgggaagtccttgaatccacaacccagaccaaggcccagcggctctttgatgcaaataaggctgagcttttcacacaaagctgcgcagatcttgacaaatggctacatggcctggagagccagattcaatctgacgactatggcaaagaccttaccagtgtcaatattcttctgaaaaagcaacagatgctggagaatcagatggaagttcggaagaaagagatcgaggaactgcagagccaagcccaggcgctgagtcaggaggggaagagcacagatgaggtggacagcaaacgccttactgtgcagaccaagttcatggagcttctggagcccttgagtgagaggaagcataacctgttagcttccaaggagatccatcagttcaacagggatgtggaggacgaaatcctatgggttggcgagaggatgcctttggcaacttccacagatcatggccataaccttcaaactgtgcagctgttaataaagaaaaaccagaccctccagaaagaaatccagggacaccagcctcgtattgatgacatctttgagaggagtcaaaacatcatcacagatagcagcagcctcaatgccgaggctatcaggcagaggctcgctgacctgaagcagctgtgggggctcctcattgaggaaactgagaaacgccatagacggctggaggaggcacacaaggcgcagcagtactactttgatgcagctgaagccgaggcatggatgagtgaacaggagttgtacatgatgtctgaggaaaaggccaaggatgagcagagtgctgtctctatgttgaaaaagcaccagattttagagcaagctgttgaggactatgcagagacagtacaccagctctccaagactagccgggcgctggtggctgacagccatcccgaaagtgagcgtattagcatgcggcagtcaaaggtcgacaagctgtatgctggcctgaaggaccttgctgaggagaggagaggaaaacttgatgagaggcacaggctgttccagctcaacagagaggtggatgacctggaacagtggatcgctgagagggaagtggtcgcaggctcccatgagttgggacaggactatgagcatgtcacgatgttacaagaacggttccgagaatttgctcgagacacaggaaacattgggcaggagcgtgtggatacagttaataacatggcagatgaactcatcaactctggacattcagatgctgccaccattgctgagtggaaagatggtctcaatgaagcctgggctgacctcctggagctcattgacacaagaacacagattcttgctgcctcatatgaacttcataagttttaccatgatgccaaggagatctttggccgaatccaggacaaacacaagaaactccctgaggagcttggaagagatcaaaacactgtggaaactttacagagaatgcacaccacctttgagcacgacatccaagctctgggcactcaggtgaggcagctgcaggaggatgcagctcgcctccaggcagcctatgcaggggacaaggctgatgacatccagaagcgtgagaatgaggtcctggaagcctggaagtccctgctggatgcttgtgagggtcgcagggtgcggctggtagacacaggagacaagttccgcttcttcagcatggtgcgtgacctcatgctctggatggaagatgtcatccggcagatcgaggcccaggagaaaccacgggatgtgtcatctgttgaactgttaatgaataatcatcaaggtatcaaagctgaaattgatgctcgtaatgacagctttacagcctgcattgagcttgggaaatccctgctggcacggaaacactatgcttctgaggagatcaaggaaaagttactgcagctgacagagaaaagaaaagaaatgattgacaagtgggaagaccggtgggagtggttaagactgattttggaggtccatcagttctcaagggatgccagtgtggcagaggcttggctgcttggacaggaaccatacctatccagccgtgaaattggccagagtgtagacgaagtggagaagcttattaagcgccatgaggcgtttgaaaagtctgcagcgacctgggatgagagattctctgctctggaaaggctgacaacgttggagctactggaagtgcgcagacagcaagaggaagaagaaagaaagaggcggccaccttctccggacccaaacacgaaggtttcagaggaggctgagtcccagcaatgggatacttcaaaaggagaccaagtttcccagaatggtttgccggctgagcagggatctccacgggttagttaccgctctcaaacgtaccaaaactacaaaaactttaatagcagacggacagccagtgaccattcatggtctggaatgtga

SEQ ID NO: 94 - DNA, 7167 bp, Mus musculus
atgagcagcactctgtcacccactgactttgacagcttggagatccagggccagtacagtgacatcaacaaccgctgggacctgcctgactcagactgggacaatgacagcagttcggcccgcctctttgagaggtccaggatcaaggccctggcagatgagcgagaagccgtgcagaagaaaaccttcaccaagtgggtgaactcccacctggcccgggtgacatgccgggtgggagacctgtacagcgacctgcgggacgggcgcaacctcctgaggctcctggaggtgctctcgggagagaccctgccaaaacctaccaagggccgaatgcggattcactgcctggagaatgtagataaagcgctgcagttcctgaaggagcagaaggtgcacttggaaaacatgggctcccatgacattgtggacggaaaccaccgtctgacccttgggctagtgtggaccatcatcctccgatttcagatccaagacatcagtgtggagacagaagacaacaaggagaagaagtcagccaaggatgccctgctgctgtggtgccagatgaagactgcaggataccccaatgtcaatgtgcacaactttaccaccagttggagagatgggctggcctttaatgccattgtgcacaaacaccggccagacctgttggattttgagtccctgaagaagtgtaatgcacactacaatctgcagaatgctttcaatctggctgaaaaggaacttggcctgacgaagctcctggatcctgaagatgtgaatgtagaccagcccgacgagaagtctatcatcacctacgtggccacttactaccactacttctccaagatgaaggccctggctgtggaaggcaaaagaattggcaaggtcctagaccatgccatggaggcagaacacctggtagagaaatacgagtccctggcctctgaactgctgcagtggattgagcaaacgatcgtgaccctcaatgaccgacagctggccaactccctgagtggagtccagaaccagctgcagtctttcaactcctatcgcactgtggagaagccacccaagttcacggagaaagggaacttggaggtgttgctcttcaccatccagagcaagctacgggccaacaaccagaaggtctacacaccccgggaaggccggctcatctcggacatcaacaaggcctgggagcggctggagaaagccgaacatgagcgagagctagcgctgcgcacagagctgatccgccaggagaagctggagcaactggctgctcgcttcgaccgcaaggctgccatgcgggagacctggctcagtgagaaccagcgacttgtgtcccaggacaactttgggctggaactggcagcagtggaggctgcagtgagaaagcatgaagccattgagacagacattgtcgcctacagtggccgggtgcaggcggtggatgctgtagctgcagaactggctgctgagcactaccatgacattaagcgcattgcggcacgtcagaacaacgtggcccggctctgggacttcttacggcaaatggtggctgcccgccgtgagagacttcttctcaacctggagctgcagaaagtgtttcaggacctgctctacctcatggactggatggcagagatgaagggccgactgcagtctcaggacttgggcaagcacctggctggagtggaggacctcctgcagctacacgaactggtggaggcggacatcgcggttcaggctgagagggttcgagcggtcagcgcctctgccctgcgtttctgcgacccagggaaagagtataggccatgtgacccacagctggtgtcagagagggtggccactctggagcagagctatgaggccctgtgtgaattggcagcgactagaagggcccgactggaagagtcacgtcgtctctggaggttcctctgggaagtgggtgaggctgaggcctgggtccgggagcagcagcacctcctggcctcagctgatacaggccgggacctgactggtgtccttcgcctgctcaacaagcacgcagccctacggggtgagatgagtggccgtctggggcccctgaagctcaccctggagcaaggtcagcagttagtcgctgagggccaccctggagccaaccaagcctcaacccgtgcagccgagctccaggcccagtgggagcgactagaagccctggccgaggagcgagcccagcagctggcacaggctgccagcctctaccagttccaggcagatgcaaatgacatggaggcctggttggtggatgcactgcgcctggtatctagccccgaggtagggcacgacgagttctccacacaggccctggccaggcagcacagggcccttgaagaggagatccgagcccaccggcctacactggatgccctgagggagcaggctgcagccctgccacctgcactgagccacacaccggaggtacagggcagggtgcccactctggagcagcactatgaggagctgcaggcccgagccggtgagcgtgcacgagccctggaggcagccctggcgttctataccatgctcagcgaggctggggcctgtggcctctgggtagaggagaaggagcaatggctcaacgggctggccctacctgagcgcctggaggacctggaggtggtccagcagaggtttgagaccctggagcctgaaatgaacgccctggctgcacgggttactgctgtcaatgacatcgctgagcagctgctgaaggccagtccaccaggcaaggaccgcatcattggcacccaggagcagctcaaccaaaggtggcagcagtttcggtccctggcagatggcaaaaaggcggctctgacatcagccctgagcatccagaattaccacctagagtgcacagagacccaggcctggatgagagagaagactaaggtcattgagtccacccagggcctgggcaatgatctagctggtgtgctggccctgcagcggaagttggcgggtactgagagagatctggaagctatctctgcccgggtgggtgagctgacccaagaggcaaatgccttggctgctgggcacccagctcaagctcctgccatcaacacccggcttggagaggtacaagcaggatgggaagatcttcgggcgaccatgaggcggagagaagagtccctgggtgaggctcggcggctgcaggatttcctgcgcagcttggatgacttccaggcctggctaggccgcacacagaccgctgtagcctccgaagaagggccagccacccttcccgaggcagaagccctcttagcccagcacgcagctctgcggggagaagtggagagagcccagagcgagtacagccgcctcaggaccttgggcgaggaggtgaccagagaccaggctgatccccagtgcctcttcctcagacagaggctggaagcccttggaaccggctgggaggagctgggtcgcatgtgggagagccggcaaggccgcctggcccaggcccatggcttccaggggtttttaagagatgctcgccaggctgagggtgttctcagcagccaggaatatgtcttgtctcacacggagatgccagggacactgcaggcggcagatgcagccattaaaaagctggaagacttcatgagcactatggacgccaatggagagcgcatccgcggactcctggaggctggacgtcagctggtgtccaagggcaatatccatgctgagaagatccaagagaaggcggactccatcgagaagaggcacagaaagaatcaggaggcggtgcagcagcttttaggacgccttcgggacaaccgagagcagcagcacttcttgcaagactgtcaggagctgagactctggatcgatgagaagatgctgacagctcaggatgtgtcctatgacgaagctcgcaacctgcacaccaagtggcagaaacaccaggcattcatggccgagcttgcagccaacaaggactggctggacaaagtggacaaggaagggcgggagctgactcttgaaaagccagaactcaaagtcgtagtgtcagagaagctggaggacctgcaccggcgctgggatgaactggagaccactacccaagccaaggcccgcagtctttttgatgccaaccgggcagagctatttgctcaaagctgttctgccctggagagctggctggagagcctgcaggcccagctgcactcagatgactatggcaaagacctcaccagtgtcaacattctgctgaagaagcaacagatgctggaacgagagatggctgtgagagagaaggaggtagaggcgatacaggcccaggcccaggccctggcccaggaagaccagagtgcaggggaggtagaaaggacctcaagggctgtggaggagaagttcagggccttgtgtcaacccatgaaagaacgctgccggcgcctgcacgcctcccgggagcagcaccagttccaccgggatgtggaggatgagatattgtgggtgactgagcggcttcccatggccagctctctggaacatggcaaggacttgcccagtgtccagcttctcatgaagaaaaaccagaccctgcagaaggagatccagggccatgagccccggattgcagacctcaaagagaggcagcgcactctgggaacagcagcagcaggtccagagctggctgagctccaagaaatgtggaaacgcctgagccatgagctggagcttcggggcaagcggctggaggaagctcttcgagcccagcaattctatcgtgatgctgcagaggccgaggcttggatgggtgagcaggagttacacatgatgggccaggaaaaggccaaggatgagctgagcgcccaggcagaagtgaagaagcatcaggtattggaacaagcccttgctgactatgcccagaccatcaaacaactagcagccagcagtcaagatatgattgaccatgaacatccagagagcacaagactaacaatacgccaagcccaggtggacaagctgtacgccagcctgaaggagctggcaggagagcggcgcgagcgcctgcaggagcacctccggctgtgccagctccgcagagagctggatgacctggaacagtggatacaggagcgtgaagttgtggcagcctcccatgaactgggccaagactatgagcacgtgactatgcttcgggacaaattccgagagttctccaaggacaccagcaccattggccaggagcgcgtagacagtgccaatgcactggccaatgggctcattgctgggggccatgctgcacgggccactgtggccgagtggaaggacagtctcaatgaggcctgggctgacctgctggagctgctggacacaagaggtcaggtgctggctgctgcgtatgagctgcagcgcttcctgcatggagcccgccaagccctggcacgggtacagcacaagcagcagcagcttccagacgggactggccgtgacctcaatgctgctgaggccctgcagcgccggcactgtgcctatgagcacgacatccaagccctcagcactcaggtccagcaagttcaagatgatggccaaaggctacagaaggcctatgctggagacaaggctgaggaaattggccgtcacatgcaggcagtggctgaggcctgggcccagctccagggaagttctgctgcccgccgacagctgttactggataccacggacaaattccgattctttaaggctgtccgagagttgatgctgtggatggatgggattaacctgcagatggatgcccaggagcggccccgggatgtgtcctctgcagatttagtcatcaaaaaccaacaaggaatcaaagcagagatagaggccagagcagacaggttctcctcctgcattgacatggggcaggagctgctggcccggagccactatgctgctgaggagatctcagagaagctgtctcagctacagtcccggcgccaggagacagctgacaagtggcaggagaagatggactggctacagcttgttttggaggtgcttgtgtttgggagagatgcagggatggcggaggcctggctgtgcagtcaggagccattggtgcgaagtgcagaactgggttgcactgtggacgaagtagagagcctcatcaagcgacacgaagcctttcagaagtcggccgtggcctgggaagagcgtttcagtgcgctggagaagctcactgcgctggaagagcgggaaaatgagcggaaaaggaagagggaggaggaggaacggaggaaacagcctcctacttcagagcccatggctagtcagccagaagggagtctggtagatggccagagagttcctgacactgcctgggatgggactcagtcaaaattgccaccatccacacaagcacccagtgttaatggggtctgcacggacaccgactcctcacagcccctgttggaacagcagagacttgaacagagcaatgtccccgaaggacctggatctggcacaggagacgagtccagtgggccccggggagagaggcagaccctgccccggggccctgctccttctccaatgccccagagcagatcatctgaagcagctcatggtgccaccctgcccacacgaggacctgagctctctgctcaggaacagatggaagggatgctgtgccgcaaacaagagatggaagccttcaacaagaaagctgccaacaggtcatggcagaatgtgtactgtgtacttcggcgtgggagcctcggcttttacaaggatgccagggcagctagtgcaggagtgccctaccatggagaagtgcctgtcagcctggccagggcccagggaagtgtggcctttgattatcggaaacgcaaacatgttttcaagctgggcttacaggatggcaaagaatacctattccaggccaaggacgaggcagagatgagctcatggctgagagtggtgaatgcagccattgccactgcatcctctgcccctggagagtcagaagagccagtggtgcccagtgccagccggggtctgacccgggccatgaccatgcccccagtgtcacagcctgagggttccatcgtgcttcgaagcaaggatggcagagaaagagagcgagaaaaacgattcagcttctttaagaagaacaagtag

SEQ ID NO: 95 - DNA, 7686 bp, Mus musculus
atggcacaagtaccaggggaggtggacaacatggagggcccagcagtctccaacaacaacaacccttcagctcgctgggagagcccagatcggggctgggatcgggaacctcccgcagccgccaatgctgcggcttcactctttgagtgctctcggatcaaggctttagcagatgagcgagaggctgtgcagaagaaaaccttcaccaagtgggtgaattcgcaccttgcccgcgtgggctgccacattggagacctgtatgcagaccttcgggacgggtttgtcctcacccggcttctggaagtgctgtcgggggagcagctgccgaggcccactcgcggccgcatgcggatccactcgctggagaacgtggacaaggctctgcagttcctgaaggagcagcgtgtgcatctggagaacgtggggtcacatgacatcgtggatgggaaccaccgactgacgctggggctggtctggaccatcatcctgcgcttccagattcaagtcatcaagattgagacagaagacaacagagagacccgctccgccaaggacgctctgctcttgtggtgccagatgaaaacagccggttaccctgaggtaaacatccagaatttcaccaccagctggagagatggcctggccttcaatgccctcattcaccgtcacaggcctgatcttgtggacctcagcaaacttaccaagtccaacgccaactacaacctgcagagagctttccgcacagccgagcagcacctggggctagcacgtctgctggaccccgaagatgtgaacatggaggctccagatgagaagtccattatcacctatgtggtctccttctaccactacttctccaagatgaaggctctggcggtggagggaaaacggattggaaaggtcctggaccaggtgttggaggtggacaagatcatagaacgctatgaggagctggcggcggagctgttggcctggatccatcgcactgtggacctcattagcaaccaaaagtttgctaactcactgagtggggtgcagcagcagctgcaggccttcacggcttactgtacgctggagaagcccgtcaagtttcaggagaaggggaacctggaggtgctactcttcagcatccaaagcaaactgcgcgcccacaaccggcgcctctttgtgcctcgagaaggctgtggcatctgggatattgacaaggcgtggggtgagctggagaaggcagagcatgagcgagaggcggccctcagagctgagctcatccggcaggagaagttggaactcttggctcaaagatttgaccacaaggtggccatgagggagagctggctaaatgagaaccagcgcctggtctcccaggacaacttcggatatgagctgccggcagtggaggcagccatgaagaagcacgaagccattgaggcagacattgcagcctacgaggagcgggttcagggtgtggcggagttagcccaggcgttggcagctgaaggctactatgatgcccggcgggtggctgcccagcgtgacagtgtccttcgccagtgggccctgctgaccgggctggtaggtgcccggcggacccggcttgagcagaatctggccctgcagaaggtcttccaggagatggtctacatggtggactggatggaggagatgcagactcagctgctgtctcgggaatgtgggcagcacctggtggaggccgatgacctgctgcagaagcacgggctgctggagggggacatcgcagcccagagtgagcgagtggaggccctcaatgctgcagccctgagattctcccagctacagggctatcagccctgcgaccctcaggtcatttgcaaccgtgtgaaccacgtgcatggctgtctgtcggagctgcaggagcaggcagcacggcggcgcgcagagctggaagcttctcggagcctgtgggcgctgctgcaggagctggaggaggcggagagttgggcgcgggacaaggagcgcctcctagaggccacgagcggcagtggtggcgcggcgggcacggcgggcggcgcgcacgacctgtccagcaccgctcgcctgctggcgcagcataagatcctgcagggcgagctgggcggccggcgggcgctgctgcagcaggcgctgcgacgcggggaggagttggctgcggcgggcggctccgtgggcccgggcgccgagcctttgcatttggctggcctggcggagcgcgcggctagcgctcggcgccgctggcagcggctggaagaggcggctgcgcgccgggaacggcggctgcaggaggcgcgggcgctgcaccaatttggcgccgacctggacgggctgctggactggcttcgtgacgcgtatcgtctagcagccgctggagattttggtcacgacgaagcgtccagccgtcgcctggcgcgccagcaccgcgctctcaccggggaggtggaagcgcaccgtggccctgtgggtggcctgaggcgccagctggcgacactgggaggagccagtggcgcagggccgctggtggtggctctgcaggtgcgcgtggtggaagccgaacagttgttcgccgaggtgaccgaggtggccgcgctgcgacgacagtggcttcgggacgcgctcgccgtgtaccgcatgttcggcgaggtacatgcctgcgagttgtggatcggggagaaagagcagtggctgctggccatgcgtgtgcccgattccctcgacgacgttgaggtggtgcagcatcgatttgaaagtcttgaccaggaaatgaacagcctgatgggccgagtcctggatgtgaaccaaacagttcaggagttggtagaaggaggtcatcccagctccgatgaggtgcgctcctgtcaggaccatctcaacagcaggtggaaccgcatcgtggagttggtggaacagcgcaaagaggagatgagcgcggtgctgctggtggagaaccacgtgctggaggtggccgaggtgcgcgcccaagtgcgcgagaagcgacgggcagtggagagcgcgccccgggcggggggagccctgcaatggcgcctgagtggcctggaggcggctctacaggcgctagagccgcgacaggcggcgctgctggaggaggcggcgctgctggccgaacgcttccccgcacaggcgacgcgcctgcaccagggcgccgaggagctaggagccgagtggggcgcactggccggagcggctcaggcctgcggcgaggcggttgcggcggcaggtcgcctgcagcgtttcctgcgcgatttggatactttcctggactggctggtgcgggcgcaggaggcagcaggcgccgtcgaggggccgctgcctcgcagcctggaggaggcggatgggctgctggcgcgccacgccgcgctcaaggaggaggtggatcagcgtgaggaggactacgcgcgcatcgtggctgccagtgaagcgctgctagcgtccgagggcgcggagctgggccccggtctggcgctagacgagtggctgccgcacctcgaggttggctggcacaaactgctcggcttgtgggaggagcgcagggaggcgctggtccaagcgcacgtctatcaactcttcctgagagacctgtgccaggcgcttgcggtgctgcgcaaccaggaggtggcgctgtctggcgctgaactcccttgcacagtggagtcggtagaagaggcgatgaaaaggcaccgggattttctcaccacgatggagctgaaccagcaaaagatgcaggtggcggttcaagctgcagagagcctgctgcggcaaggcaacgcctacggggagcaggcgcaggaggcagtggctcggctgctagagaagagccaagaaaatcagctgagggcccagcagtggatgcaaaaactactggaccagcttgtgctgcagcactttcttagagattgtcatgagctggatggctggatccatgagaagatgctgatggctcgtgatggcacccgggaagacagccacaagctgcacaagagatggctccggcaccaggcgttcatggctgagctggctcagaataaggagtggctggagaagatagaaagggagggccagcaactgatgcaggagaaaccggagctggcagcctctgtgcgcaagaaattaggtgagatccggcagtgctgggcggagctggagagcaccacacaggccaaggcgcgccagctcttcgaggccagcaaggcggaccagctagtgcagagcttcgcggagctggacaagcggctgcttcacatggaaagccagctgcaagacgtagaccccggtggggacctggccactgtcaacagccagctcaagaagttacagtccatggagtctcaggtggaggagtggtgccgagaggtgggcgagcttcaggcgcagacggcggcgcttccgctggagcaggcgagcaaggagttggtgggggagcggcagagtgcggtgggcgagcgcctggtgcgcctgctggagcctttgcaggagcgacgccgcttgttgctggcatccaaggagctgcatcaggtggcccacgacctggacgatgaactggcttgggttcaagagcggctgccactggccatgcagacagagcgaggcactggcttgcaggctgtccagcagcacatcaaaaagaaccagggcctgcggcgggagatccaggctcacgggccgcgcttggaggaggtgctggagcgcgcgggcgtgctggcctcgctgcgcagcccagaggccgaagcggtgcgccgtggccaagagcagctgcagagcgcctggaccgggctgcgggaagcggccgaacggcggcagcagacgctggacgccgccttccaggtggaacagtactactttgacgtggctgaggtggaggcatggctgggcgagcaggagctgctcatgatgagtgaggacaagggcaaggatgaacagagcaccctgcagctgctcaagaagcatttacaactggaacagggcgtggagaactatgaggaaagcatcgcccagctgtcacgccagtgccgggcgctactggaaatgggacacccagacagtgagcaaatcagccgccgacagtcccaagtggatcgcctctatgtggcgctcaaggagctgggcgaggaacgcagggtgagcctggaacagcagtactggctctaccagctcagccgccaggtggatgagctggaacactggatagccgagaaggaggtggtagctggctccccagagctgggccaggacttcgaacacgtgtcggtgctacaggagaaattctcagagtttgccagtgagacaggaaccgcagggcgggagcggctggcggcggtcaaccagatggtggacgagctgattgagtgtggtcacacagcagcggccaccatggctgagtggaaggacgggctgaacgaggcctgggctgagctgctggaactcatgggcactcgggcccagctgctcgctgcctctcgggagctgcataagttcttcagcgatgcccgggagcttcaagggcagattgaggagaagcggaggaggctgccccgcctgacggcaccacctgaacccagacccagtgccagctccatgcagcggaccctgcgagcctttgagcacgacctgcagctcctcgtgtcccaggtacggcagctgcaggaaggggcggcccagctgcggacggtgtacgctggcgagcacgccgaggccatcgccagccgcgagcaggaggtgttgcagggctggaaggagctgctagcagcctgtgaagatgctcgtctgcacgtcagctccacggccgacgccctgcgcttccacagccaggcccgcgacctgctctcctggatggacggcatcgcgggccagatcggggcagctgacaaacccagggatgtgtcatcggtggaggtgcttatgaactaccaccagggcctgaagacagagttggaggcgcgcgtgcctgagctggcaacctgccaggagctggggcggtctctattactcaacaaaagcgccatggctgatgagatccaggcccagctggacaagctgggaagccggaaggaggaggtgtcggagaagtgggaccgtcactgggagtggctgcagcagatgctggaggtacaccagtttgctcaggaggccgtggtggctgacgcctggctgacagctcaggaaccgctcctgcagagccgggagctgggcagcagtgtggatgaggtggagcagcttatccggcgacacgaggccttccgaaaagcagctgcggcctgggaggagaggttcagctctctgcggcgcttgaccacgatcgagaaactcaaggcagaacagagtaagcagccacccacccccttactggggcgcaagttctttggggaccccacagagctggcggccaaggcagcgcctttgctgcgtccagggggctatgacaggggcctggagcctttggcccgcagggcctcggacacgctgtcagcggaggtgcggacccgggttgggtatgtgcgccaggagctcaagcccgagcgtctccagccgcgcattgaccggctgccagagacctcggggaaggtagaacccgcggccccgacagccgcagcgttggacacgacggacacccctgggactccggcggcgacggagttggtccggccccggtcggagcgccaggagttagcggatcgtgcggaggagctgccacggagacgaagatcagaacgccaggagtccgtggatcaaccagaggagacagcgcggaggcggcggcctgagcgccaggagtccgcggaccacgaggggccgcacagccttactctaggtcgctacgagcagatggagagacggcgggagcggagggagcggcggatagaacgacaggagtctagcgaacaggagactcccaccaggggagagctggtcaaagggaaggccactctggctgatattgtggagcaacttcaggagaaagaggcaggcccagggatccctgctggggtgccgtcgctgcctcagcctcgcgagcttccccctggtcgcctgcccaacgggcttgagccgcccgagcggacacctcggcccgatcggccgcgggcacgggaccggcccaagccgcgccggcggccacggcctcgagagggtggtgagggcgggggaagccggcgctcgcgctccgcccctgcccagggaggctccgcccccgcgccgccacctccgcccactcacacagtgcagcacgagggcttcctgctgcgcaagcgcgagctcgacgctaaccgcaagtcgtccaaccggtcatgggtgagcctgtactgtgtgctcagcaagggggagctgggcttctacaaggactccaaaggcccagcatcagggggcacgcatggtggggaaccactgctcagcctgcacaaagccaccagcgaggtggctagtgactacaagaaaaagaagcatgtcttcaagctccagacccaggatggcagtgagttcttgctccaggctaaagatgaggaggagatgaacggctggctggaggctgtggctaactccgtggcagaacacgccgagatcgcccgatggggtcagacactacctaccacatcatccacagatgagggcaaccccaagcgtgagggcggggagcgtagggccagcgggcgccggaagtga

SEQ ID NO: 96 - DNA, 11046 bp, Mus musculus
atggggacagtgtatcaagatagggcctcagactcctggcagaaggatcatcagtttccacagtacttcccagcccccatgcctccaccacctccagacacagggaaatgcccagtcgccattcaccctcaaagagctaaggctcataagctggttgtcccatcaaccctccacctccttagccgcagcgtccctgacgagaagacccaggcccaaagctcagcccttctgagttcaagtttggccatggactctgagtatgagataggccatgtccgcaagctccaggctcagcatacacacatgcaggagaagaccttcaccaactggatcaataacatcttccgactaggacgggtgggcatcaggatccagaacctgtacacagagtttgctgacggtgcccacctactgcggctattggagcttatctctggggaggccctaccagcgcccagtccgggccgcctgcgcgtgcacttcctggagaacaacagccacgccctggccttcctcagggccaaggtgcccattcccttcatcgggccagagaacattgtggatggggaccagtcactcatcctgggactcctctgggtcatcattctgcgtttccagatttcccacatctccttggacagggaggagtttggggccagtgcggctttgctgtctgccaaggaagccctgctggtctggtgtcagcggaagacagccggctacaccaatgtggacatcactgacttctcccgaagctggagtgacgggctcggctttaatgccctgctccacgctcacaggccggacctgctggattatggctcgctgagtccagaccgccctctgtataacctctcctttgccttccgagtggctgagcagcagcttggcattgcccagctgctcgaccctgaggatgtggcagccctgcatccagatgagtgctccatcatgacctacctgtctcagtactaccactacttctcccgtctgcagcgggggcacacggcccagaggagactggctaagatcctgctgcagctgcaggagacggaggtattgcaggcacaatacaagcaactggtggctgacctgctctgctggattgaggagaagaagatgcagctagaagctcgggacttcccagactcactgcctgccatgcgccagctactggcagcctttgcctccttccgtgcccgggaaaagccacctcggtggcagcagcgaggagccacagaggccctgctcttccagctgcagacaacactccgagcccaaaaccgaaggccattcctacctcgagagggcctgggccctgcagagctggcccagcgctgggcagaactggagagggcagaggcctgcaggagccaggccatgcagcaaaggctgctacagctggagcgactggacactctggcccgccgctttcagtgcaaggcatcccaccgggaaagctttttaaatgacgtagagcagatgttagaccaggccagagcctccctcaccgacccagccacagtggaggcagccactcagaggctgagcgttctggaggctgccatcctgccccaggaagggcgcttccaggccttgggtgagatggcagacatcctccggcaggaagagtatcacagctgggcggatatggcccgcaggcagaaggagatcacggggcgctggcggaggctcctacggtgtctacaggaggagaggaagcgcatggaagactcaaaggctgtgctgagtctgctgcagggggtggaggctgtcactcaccagcttggggagctgcaggtgttggccagctccacagtctatgggcaacagctggcagaaatagtgtcgctgctgcagagccatgacctgctggaggcccaggtgtcagcccacaggacccatgtgactcatcttgtccaccagaccacccagctagactcccagggtaccagtgtggaggtgctgcaggctaaagccctagcactggccgagctccaccacagcctggtgtctcttgtcagagcccgacgtaccctgctggagcagaccctccagcgagcacagtttctgcgcagctgtgaggaggaggaggcctggttgcaagagcacagacagctaatggagaccgcggtcctggaccgggacctcactcagatcgctactgctctgcagaaacacaaggctctggaaacagaactccatcgccaccaggcagtgtgtgtagatctcatgcagagaggacgcaacttcagtgtcagagagcccctgacacagccagatccactggaaagggcagaagcagtgcagggaacctggcagctgctctgggctggagccgcaaggcggcgcgcccggctgcaaacagcactgctaattgggcagtacttttctgactcggccgaagcagcttcctggcttttccagcggcagaaacaactagagagcgcatcctgcgggaaggaccaggcagacgccgaggccctgttgctgcaacacctgcgcctggagcaagacgtgcgcgccttcgcggcggagctgcgcgagctagaggagcaggcgcgggctgccgcagccctagtgtcacacatgagcattagtgctacacgctcttcccccaatgaaagtcttgatggccctgggtgctggcttgtgtcttctgtcttgcctaccccaagtataaccctggatagtgtcctacctgctgagaatgacgttcacttcaactccagcaccatactccaggctcaggctgacgtgagccagacctatgagaagcttagggccctggcaaagcttcacaggacccgactggaggagtcaatcgccctgtttagcttttatagctcctgtagggagcttcagtcctggctggagaagcagaccgcactgttccaaacattgcagccccagggacacaacttagaggtcatacaactcaaatatgagaatgttctcatgaccttggccactggaaaaggccactgggcagaggccatcaacactgctgaacaactgaagcagagatgtccaggacacatctcgaaaatccaacaacaacaggaggacctgaagcaaaggtggcagcagctggaagccctgaaggaggagaaactcctgcagctgacacgtggcatggaggtgtgcagtcttttacaggagtctgaacccatacaagcccaactgctaaatgtgataagcaggctggagactctgggaacaagaagctctggggacagccatcataccctacagcagacccagcagaaggtcctggtattggagaagaagatctcctacctccaaagagcaaccatagaggtgatggagtcaggctccccagagagcaggctgctttgggagcaggtcctgatgctgcagtcactgctaaagcaagcgcaagggcaggtggcccggcagatccaggtccagactgtggctcgggttcagcgaggcatcctccaggagagccagaagctgctgctgtgggcagaggacatccaggctcagctgtgcagcaaagaggagcggcaggttgaggcttcagccctgcggccgctgaggaggcatggaaccctacaggaggagacctgcctgtgggaagagaggctgcagcagctggaggctcagggtcagccggtggcagtctcagactctccacagtcccaggaggtggccagcgctctaaggctcctaggccagcacagccagcagctgaaggctctgtgggagcagagacagcagaagttttgggaggggctggagctgcaggggtttggccaagaagtagatgatttcatggccacctgtgccagccatgaggccttactgcagctggacaaccttggggaggacataagggaggcccagagcctgctgcagcagcaccagggtttggggtggctccgcagcaccctgggatcacgggcagaggccctccgtgcacgcggtgagaagctgcttctgagccatccagctgccgtgagcaagatcagagagctgctgcacagtgcccaggcccagtggaccagggtccaagagaggagtgagcagagaagggtccagctgctggcttccctccaattgcaggaatggaagcaggctgaagaaggcctaatgctgtggatggaggagaagtggcccagggtggctgatgagcgctcccaagcaggaagcaacattctgcagaaactcaagtggcgcaaaataactaagagtgagctattagcctctcggaggtacatggaagagctacagcaggctgggaaagaactgttgcatagcaacccatatgcacaggaggacatacaggacagacttcaaagccttaatcacaaatgggaagagttgaaccacaagatggaagatcgaggggataggctgcctcagaccagacagcaggaccagctcctagaactaatacaggatgtccaggagacaatggagcatctggagggagccctgcagagcacagaaaccgggcaggacctgtgctccagccggaggctgcagagacagcattgcaagctagaggacaagagccaggcactggccagcaagatggatgccctcatctctcagacccacaatgcattcacttcctggaccatcctggaggagagccagaagtgtcaccagaggttcaagtccctgcagagcaagctagccacccaacaccagcaactgcaggcctcagttgagctgtatgaatttaatctccttagcaacctggagctcacatgggcagctgagcacatgcccaatgccgctctcaactgccctgcccagtgctggcatgatgcccacagccttcaacgaaagcacaagatgctccaggctgaggtgaaaggtcatgtaaggcacatgtacagggtgctaagttctggtcagcgtctagcagcctctgggcaccctcgagctcagcatatcgtggaacagtgccagaagctagaaagccactgggcaggactggagcaggcgtgtgaagaacgtgcacactgcctgcaacaggctgtcactgtccagcagtactttctgaacgtgtcagagatggagacctgggtggaggaaaagcggcctctggcaagcagtcaggactacggcagtaatgaggaagctaccagtgggctcattaggaaacaccagatgctccagcaggaggtagctctttattggagctccatggaagatctcgagcagaggttccagacccttgctgaatttgaggcccctgagcggttgggtgtggtacgggagaagttgcaggcactacggaagctggcagacgaacgggggcaggagctggaggggaccctgagactacatgagttcatgagagaagctgaggacctgcagagctggctgtccagcaggaagcaggtggccagaggaggggacacctttggagaggaccatgagcacgtgctgcaactctgcactgagtttacaaagtttcagtaccaggttgaaactggtgcccagcgagtggaaacctgtcgactgctggcagagagcctacaagagcgtgggcacagtgctgcccccaaggctcaccagaggcagcaggatatacaggcttcctggtctgaactgtgccagttgacccaggcccgaagccgtctgctcaatgacgccgaaatcactcttagagtccacggagaccttctggaagtccttacccagattcaggagaaagccacaagcctccctaacgatgtggcccaggacctgtgtggggtagagaaccagctccagagacatgagaggctggaacgcgagttggcaggcatggagcagcaggtgcaggaactgatgaaggctggaggcagagtgcaggagctgtgtccaggaactcaggcccttgccgctgtccagcaaaagcagcaagctgtgacccaagcttgggaggccctccagctgcgcatggagcagcgcaaggctcaattggaacgaggatatctcctggtccggttccacacagcggtgagggactatacctcctgggcggccagcgtgcatcaggagctacagatggaggaggcctcctgggaaccccacagccttttgctcaggctcagagcccatcaatggctgtgggcagaactgaaagccaaggaggagctgcagcaacgggccactaagatgggccagcaagctctgctggcagcaggaacacccgctaaggtccaggatgggcttcgaaccctacaggaggaacgcgaccaagtgttccaggcctgggcactcaagcaagagaagctgcaggccatgcttcaagaacagcacctcctcaggcaatgcggccacctagtggaggtcctcacagcccaggaggcattcctaaaagccagtggcctggggagctcagtggaagaagtggagcagttgatccgaaagcacgtgatcttccagaaagtgctagctctccaggacaagaaggagtcggctctgaatgagcagctaaagacgatttcaagccctaaggggcagaacctgttttgccacatgttggagcaccgggctcaagtgaaggaactggcagagagccggggccaggctctgcacacctccctgatgataggcaactttgtcagggcagcaacccaggctgaggactggatccagcagcgggtccagcaactgagagcctggagccctcttgggaatctaaaggattatctgaagcacctgaggaaacaccaggccttcagggctgaggtccaggctcaggagcagatcttgacctctgttgccaagcaaggcgaagagctcctcagtcagagccaccctcaagctggagaggtctcccagaggctggaggccctgcgggacctctgggagaagctgaggcaggcagtgaccctgcagggccaggccctagagaacagatacaacttccaggagttcctgcagagagtggacctagcagagacctggatccaggagaaggagaggatggtgaacagctgtgacattggcctgaaccttgagcactgcctgcagctctgcagacaagtccgcaggttacagtgagggagtgcccgtgtcacagtggatgatgcccacatcaagggaatcaaaaacttgtcactgcagctcaagaaccagggccctgaggaatccgagaccatctgccagcggcaaaaccagctcaacaataggtggaagactttccatggcaacctgctcctctatcagcagcggcttgaagcagccctggagatacatagattgtccagggaactggatgacgttattgagcggctcagggagaaggaatccctgatctgggccccagagggcactgaagatttggagaatgtgcagaggctatcatggagacagaaagtgctgcagcaggagatgggcctcatccagacccaggtggagtctcttgaaggtaggattggccggctctgcaaggaaagtcccgaggttgcccacagcctcagacataagcagcaagaaatgatggacagctggtggaaggtctggagcaaagcccagaacaggagggagttgctggatgtgggccatgaagttcagaaactccagaccctgctgcaggatctgcaggactgggcccggggactacaggctgagatggccacacagggcaccccctgcagccctgtgagaatccagtacatgttggaagagtaccgggcatacaaggttgagctggacatccgaacagagagccttaacctggtccaaagcatggggcagcggctgcttgcatctggctacccacaggcctctgagattcaccagaccctggccgctgtagagcaggggttgagtagcttgcgggaatcctggcagggccggcaacagcagctacagcaggccttggagcagcagctgtttctgggctctgtggaaaaggcggaacgctggcttgacagtgaagaggcctccctggctagtgagggagtggcggaccccttggtcactgtggagacccttctgtcaaagctcaagaggcatgagcagggcctgaaggcccaggccgaaaagatccgtgcattggaggccacagcccacagcctgcaccagggtggacactctgaggcgcgtagcatcctggacagatgccaggccctgctcctgaggacagaggcactcacagagcaagcgagggcccggggacaccagctggaggagctgcggaagcttcggacatttttgcaggattccaatgaggtaactgcatggctgagggagaagagcctggcggctctggatgagggccagcaggacccagccacgatgcaaacacagttgcagaagcagcagaatttccaggctgagctggacgccagtgttcaccaacagcaggaggtccagatggaggggcagaagctgctacaagggggccacccggcctcagagaccatccgggggcaactggaagaattaggaggcctctgggatgagctgcagaccaactgccagaggaagatggccagactacagggggccctcaaggtcctgcatctgcagagaatgctgaaggaactggagaagtggctggagcacatggaagcagagctgagagtccctgtcagaagccaggcgctgcctagagtgggcgaactcctgggagcccaggaggagctggaagcagccatggacaggcaggccaaggaagtgcaagagttgcagggccagtcccaagcctgcctccaggaaggccactgcctcgccaaagatgtggaagagcaagcccggcagctgcttcagaggtttcagagccttcgggagcccctacaagagcgcagggcatccctggaagcccaaaggctcctcttacagttcttcagggatgctgatgaggaaatggcctgggtgcaggagaagctgccctcagccacagcccaggactacggccagagccttaacactgtgcgccacctgcaggagaaacaccagaatttggagaatgagatccatagccacaaggctctgagccaggtggtgacaggtacagggcacaagctcatacaggcagggcactttgccactgaagaggtggccgcccgggtgcagcagctggaggtggctctaaaccgcttagagacagaggccgcacagaggaggaggagactgcagcaggccctggaggcccagcagactttggtggagctcctggaagcaggatcctggctggctgaacgggaccatattctggacagtgaggacctgggccaggacgctgaggccacacaggctcttctgcggtgcctagaggccaccacaagagacttggaagggttcagcagtcgcattgagcagttacagcaaacagttgcccttctggagagtggacagaccccaggcagtcctagggtgctggcccagctgcaggctgtgagagaggcccatgcacggctgctgcagagagcagaaagcaggggggaggcgctgcgtgaacagctgcacctgtaccagctggagcaagaggccttgctcctggatgcctggctgaccaccaagctggccgtcgctgagtctcaggactatggacaggatctagcaggcatcaaggtgctggaagacatgtttggtgctttcaacagagaagtccagagcctgggccaggccaagatgcagaccctgagggagcggatggcttccctagaaagaggagcacccaggttctacccccagattcaagctcagaagtgtcgcgtccaggccgcttgggaggggctgaacaaggcaatcaaagtccgtacagagaacctggcagcagcctgcgatctccggagctttgagcaggctgcctcggagctgcagagatggatacaggagaagaccaccctgctggaggaagcattccaacagcagcagcagcagcagcagcagcagcataggcgcctgcagagagaactgagggctattgaaaaagaggtgtcaagagtgcagatggaggcccatcggctcggccagcactaccctgtggctcaggggagtcttagtgagtggctcaccaaggtgcagggggcctggaccaacctggaggccaaagtccaggaatggagccagaagctgttgcaggctacccagggccacacctttcttgggagctgccgggaattgctagcgtgggctcaggagatgcaggagctgctttctaaggagaagcaggctggggatgtggtgggggccaagcagttccttgagcagcatgaggcgctggagcaagagattcaggaacgctgccttcaagcccagaccatacggcacgaagggcagcagctgctggacaacggccacttcctgtccccagaggtggcagagtgtatgcaggagctggaaagacatctgcaggagcttcaggtagcctgggccctgcgtggacaacgctgggaacagacccggagcctgcaacagctgcggcagaggctggagctggctgaggcttggctggcctcctgggagcgcctgctgctggaccccagctgtgggcactcggtgttggaagtggaacgcctgctctacagacacgagggcttagaaaagctgctggtggcccacgaggagacattcattcagcttcagacgatgacagaggaggcaaagggtggtcatgtcacggaggcatctgtggaacagcagccccccacagaagggaggcagcccagaaccagcttcccaaccagcagccatgggatcttggcaaggggagcctcgagcccattctcagatatgaggaaggcagaagtgccaagtggcactggggaactggcttacgtgtccccccttgtacctgaggagactgaatttctgtttgcagtgttgtctgaaaagcaggctgcaagctggcagccagccttgggtagcatggcaggtctaaaccttaagatgaatcctcagtcaacaccaatcctcggggctaccagtggagacacacctgggaaccactcgactactgacccaaaggtaccctccccagggctgctcaggaccagtgtgcagaacacagctcctgtcagaggacaagcaactgatgtcgcaagtcactggctatgcctgagatga

SEQ ID NO: 97 - DNA, 7287 bp, Pan troglodytes
atggagcaatttccaaaggaaaccgttgtggagagcagtgggccaaaggttttggaaacagcagaagagatccaggagaggcgtcaggaagtgttgactcggtatcaaagtttcaaggagcgggtcgctgagaggggtcagaagcttgaggattcctatcacttacaagttttcaagcgagatgcagatgatctggggaagtggatcatggagaaagtcaatattttaaccgataagagctatgaagacccaactaatatacaggggaaatatcagaagcatcaatcccttgaagcagaggtgcaaacaaaatcaagactcatgtctgagctggaaaaaacaagggaagaacgatttactatgggtcattctgcccacgaagaaacgaaggcccacatagaggagctacgccgcctgtgggacctgctgttagagctgaccctggagaagggtgccctgttgctgcgggccctgaagttccagcagtatgtacaggagtgtgctgacatcttagaatggattggagacaaggaggctatagcgacatcagtggagctaggtgaagactgggagcgcaccgaagttctgcataagaaatttgaagacttccaagtggagctggtagctaaagaagggagagttgttgaagtgaaccaatatgccaatgagtgtgctgaggaaaaccatcctgacctacccttaattcagtctaagcaaaatgaggtgaatgctgcctgggagcgccttcgtggtttggctctccagagacagaaagctctgtccaatgctgcagacttacaacgattcaaaagggatgtgactgaagccatccagtggatcaaggagaaggaacctgtactcacctccgaggactatggcaaagaccttgttgcctctgaaggactatttcacagtcacaagggacttgagagaaatcttgcagtcatgagtgacaaggtgaaggagttatgtgctaaagcagagaagctgacgctttcccatccttcagatgcacctcagatccaggagatgaaagaagatctggtcgccaactgggagcatattcgtgccctggccaccagcagatatgaaaaactgcaggctacttattggtaccatcgattctcatctgactttgatgaactctcaggctggatgaacgagaagactgctgcgatcaatgctgatgagctgccaacagatgtggctggtggagaagttctactggacaggcatcagcagcataagcatgagattgactcttacaatgaccgatttgaatctgctcgtgagactggtcaagacctcctgaatgccaatcatgaagcctccgatgaagttcgggaaaagatggaaatacttaccaaaaactgggctgccctgctggaactgtggaacaagcgtcatcatcagtatgagcagtgcttggactttcatctcttctacagagacagtgagcaagtggacagttggatgagtagacaagaggccttcctggaaaacgaggatctgggaaactcactgggcagtgcagaagcccttcttcagaagcatgaagactttgaggaagcctttactgcccaggaagagaagatcacaactgtagacaagactgcaaccaaattgattggtgataaccattatgattcagacaacatcgaggctatccgtgacgggctgttagcccggcgggatgccctacgtgaaaaggctgccactagacatagattgctgaaggagtcattgcttctgcaaaaactgtatgaggactcagatgacctaaagaactggatcaacaagaagaaaaagttggcagatgatgaagattacaaggacatacagaacttgaagagtagggttcaaaagcagcaagtctttgaaaaggagttggaagttaataagaccctgctggaaaacatacagaaaactggccaagagatgattgagggtggtcactatgcctctgacaatgtgaccactcgtctgagtgaagttgtcagcctctggaaggagttgatggaggctacagaacagaaagggacccagttgcatgaggccaaccagcagctgcaatttgaaaataatgcagaagatttgcagcactggctggaggatgttgagtggcaagtcacctctgaggattatgggaaaggcctggccgatgtacagaatcgactcaggaaacacggcctcctggagtcggctgtggctgctcgtcaggatcaggtggatacccttacagacctggctgcatattttgaagaaataggccatcctgattctaaggatataagggcaaggcaggagtcgttggtatgccgatttgaagctctgaaagagccactggccacccgaaagaagaatctcttagaccgtctccatctgcagctaatttgtagagacacagaggatgaggaggcctggatccaagagactgaaccctcagctacttccacctaccttggaaaggacctgattgcttccaaaaagcttctgaataggcacagagtcatcctggagaacattgccagccatgaaccacgcattcaagagataacagaaaggggaaacaagatggtagaggaaggacactttgctgcagaagatgtggcctctagggtcaagagtttgaaccagaatatggagtctctctgtgctcgagctgctaggcgacaaaataatcttgaagccaatgtccagttccagcagtacctggctgacctgcatgaagcagaaacatggatcagagagaaggagcctattgtagataatactaactatggggctgatgaagaagcagctggggctcttctaaagaagcatgaggcctttctattagatctcaattcatttggagacagtatgaaagctctacggaatcaggcaaacgcctgccagcaacaacaggctgcaccagtggagggagctgctggagaacaaagggtcatggctttatatgacttccaggcccgcagcccccgagaagtcaccatgaagaaaggtgatgtcttaacgctgctcagttccatcaataaggactggtggaaggtggaagctgctgatcatcagggcattgtcccagctgtctatgtcagaagactggcccacgatgagttcccgatgctcccacagcggcgacgagaagagccaggcaacatcacccagcgccaggagcagattgagaaccaataccgctccctcttggatcgggcagaagaacgcaggcgtcgtctattgcaacgttataatgaatttttattggcctatgaggcaggagacatgctggaatggattcaagagaaaaaggcagaaaacactggagtggaactagatgatgtttgggagctgcagaaaaagtttgatgagttccaaaaggatttgaataccaatgagcctcggctaagggatatcaacaaggtagctgatgatctactgtttgaaggacttctaacaccagaaggagctcaaatccggcaggaattgaatgcccgctggggttctttgcagaggcttgcagatgaacagcggcagctgctgggcagtgcccatgctgttgaagtgtttcacagagaagcagatgacacgaaggagcagattgagaagaaatgccaggccctcagtgctgcagaccctggctcagatctgttcagtgttcaggctcttcagcgacggcatgagggctttgaaagggacctcgtacccctgggagataaggtgaccatactgggggagacagcagagcggctcagtgagtcccatccagatgccactgaggacctgcagagacagaaaatggagctgaatgaggcctgggaagacctgcagggacgtacaaaggatcgtaaggagagcctaaatgaggcccagaaattctacctgttcctcagcaaggccagggatctgcagaactggatcagtaacattggtggcatggtatcatcacaggagctggccgaagacttaactggcatagagatcttgctggagagacatcaggagcaccatgctgacatggaggcaaaggctcccaccttccaggccttagaggacttcagtgcagaacttatcgacagtgggcaccatgctagccctgaaattgaaaaaaagcttcaagctgtcaagctagagagagatgatttggagaaggcttgggaacaacgcaagaagatcctagaccagtgcctggagttgcagatgttccaggggaactgtgatcaagttgagagctggatggtggcacgtgagaattccctgaggtcagatgacaaaggttccttagacagtctggaggccttgatgaagaaacgggaagatttggacaaagcaatcactgcccaggaagggaagatcactgacctagaacattttgctgagagcctcattgctgatgaacactatgccaaagaagagattgctactcggctgcaacgtgtactagacaggtggaaggctctcaaagcacaactgattgatgagcggacaaagcttggagactatgccgacctaaaacaattctaccaaaaccttgaggagctggaagaatggatcagtgagatgctgcccacagcctgtgatgaatcctacaaagaccccactaacattcaggcaaataatataatttctgtttcattttcccttcagaggaaatacctgaaacaccagacctttgcaaatgaagtcgatggccgatctaagcaggtgcatgacgtcatcaacctggggaactccctgattgagcgtagcgcttgtgatggcaatgaagaggccatgaaggagcaactggaacggctgaaggaacattgggatcatctgcttgagagaacaaatgacaaagggcagaagctcaatgaggccagtcgtcagcagaggttcaacacaagcatccgggactttgagttctggctctcagaggcagagacattgctggccatgaaagatcaggccagggacttggcttcagcaggaaacctactcaagaagcatcagctattggagacagagatgttggctcgagaggatgcactcaaggacctgaatacattggctgaagatttgctctccagcgggactttcaacgttgatcagattatggagaaaaaagataatgtcaacaagcgtttcctgaatgtccaagaattggcagctgcacaccatgaaaaattgaaagaggcctatgccttgttccagttcttccaggatctagatgatgaggaatcctggatagaggagaagttgatacgagtgagctcccaggactatgggagagatcttcagggcgttcagaacttgctgaagaagcacaaacgcctagagggggagctggtggcacatgagcctgccatccagaatgtgctggatatggcagagaagctgaaagacaaggctgctgtggggcaagaggagatccagttgcggctggctcagtttgttgaacactgggagaagctcaaagagttggccaaggcccgaggacttaagttggaagaatccctagaatacttgcaattcatgcagaatgctgaggaagaggaagcttggatcaatgaaaagaatgctttggctgtccgaggagattctggagatacattagctgctactcagagcttgctaatgaagcatgaagctttggaaaatgactttgctgtccatgagacccgagtacaaaatgtgtgtgcacaaggagaagacatcctaaataaggtgagctatcagaacaaagagatttcttccaagatagaggctctgaatgaaaagaccccttctctggccaaggcaatagctgcttggaagttgcaattggaagacgattatgcctttcaggaattcaactggaaggctgatgtggtagaggcttggatagctgataaggaaacaagcctaaagaccaatggcaatggtgcagaccttggtgacttcctcactctcctggcgaaacaggacactctggatgccagtctgcagagtttccagcaagagagacttcccgagatcaccgacctgaaggacaaactgatttctgctcaacacaaccagtctaaagccattgaagagcgttatgccgctctgctgaagcgctgggaacagttgctggaagcctcggcagtccacagacagaaattgctggagaaacagctgcctctacagaaggctgaggacctgttcgtggaatttgcacataaggcttcagctttgaacaactggtgtgaaaagatggaagaaaacttgtcagagcctgtgcactgtgtctccctgaatgaaattcggcagctgcagaaagaccatgaggacttcttggcctccctggctggggctcaagcagactttaaatgtttgctggagctagaccagcagattaaggccttaggtgtgccttccagcccttatacctggttaacagtggaggtgctggaaaggacctggaagcacctatctgacatcattgaggaacgggagcaggagctgcaaaaggaagaggcaagacaggtcaagaactttgagatgtgtcaggagtttgaacagaatgccagtaccttccttcaatggatcctggaaaccagggcttactttctggatggatcattgctcaaagaaacaggaactctggaatctcagctggaagcaaataaaagaaaacagaaggagatccaggcgatgaagcgtcaactaaccaagattgtggacctgggggacaacttggaagacgctctgatccttgatatcaaatacagcaccattggattggctcagcagtgggaccagctctaccagcttgggttgcggatgcaacacaacctggagcaacagatccaggccaaggacaccaaaggtgtgagtgaagagaccctaaaggagtttagcacaatctataaacactttgatgagaatttgacagggcgcctgactcacaaagagttccggtcctgcctgagaggactcaattactacttgcccatggtggaggaggatgaacatgagcccaagtttgagaagttcctggatgctgtggatccagggaggaagggctatgtctcactggaggactatactgctttcctgattgacaaggagtcagaaaacatcaagtccagtgatgaaatagagaatgccttccaagccctggcggagggcaagtcatatattaccaaagaagacatgaagcaggcccttaccccagagcaagtgtcattctgtgccacacatatgcagcaatatatggacccacggggtcgaagccatctctctggctatgactacgttggcttcaccaattcctgctttggcaactaa

SEQ ID NO: 98 - DNA, 7251 bp, Pan troglodytes
atggagcaatttccaaaggaaaccgttgtggagagcagtgggccaaaggttttggaaacagcagaagagatccaggagaggcgtcaggaagtgttgactcggtatcaaagtttcaaggagcgggtcgctgagaggggtcagaagcttgaggattcctatcacttacaagttttcaagcgagatgcagatgatctggggaagtggatcatggagaaagtcaatattttaaccgataagagctatgaagacccaactaatatacaggggaaatatcagaagcatcaatcccttgaagcagaggtgcaaacaaaatcaagactcatgtctgagctggaaaaaacaagggaagaacgatttactatgggtcattctgcccacgaagaaacgaaggcccacatagaggagctacgccgcctgtgggacctgctgttagagctgaccctggagaagggtgccctgttgctgcgggccctgaagttccagcagtatgtacaggagtgtgctgacatcttagaatggattggagacaaggaggctatagcgacatcagtggagctaggtgaagactgggagcgcaccgaagttctgcataagaaatttgaagacttccaagtggagctggtagctaaagaagggagagttgttgaagtgaaccaatatgccaatgagtgtgctgaggaaaaccatcctgacctacccttaattcagtctaagcaaaatgaggtgaatgctgcctgggagcgccttcgtggtttggctctccagagacagaaagctctgtccaatgctgcagacttacaacgattcaaaagggatgtgactgaagccatccagtggatcaaggagaaggaacctgtactcacctccgaggactatggcaaagaccttgttgcctctgaaggactatttcacagtcacaagggacttgagagaaatcttgcagtcatgagtgacaaggtgaaggagttatgtgctaaagcagagaagctgacgctttcccatccttcagatgcacctcagatccaggagatgaaagaagatctggtcgccaactgggagcatattcgtgccctggccaccagcagatatgaaaaactgcaggctacttattggtaccatcgattctcatctgactttgatgaactctcaggctggatgaacgagaagactgctgcgatcaatgctgatgagctgccaacagatgtggctggtggagaagttctactggacaggcatcagcagcataagcatgagattgactcttacaatgaccgatttgaatctgctcgtgagactggtcaagacctcctgaatgccaatcatgaagcctccgatgaagttcgggaaaagatggaaatacttaccaaaaactgggctgccctgctggaactgtggaacaagcgtcatcatcagtatgagcagtgcttggactttcatctcttctacagagacagtgagcaagtggacagttggatgagtagacaagaggccttcctggaaaacgaggatctgggaaactcactgggcagtgcagaagcccttcttcagaagcatgaagactttgaggaagcctttactgcccaggaagagaagatcacaactgtagacaagactgcaaccaaattgattggtgataaccattatgattcagacaacatcgaggctatccgtgacgggctgttagcccggcgggatgccctacgtgaaaaggctgccactagacatagattgctgaaggagtcattgcttctgcaaaaactgtatgaggactcagatgacctaaagaactggatcaacaagaagaaaaagttggcagatgatgaagattacaaggacatacagaacttgaagagtagggttcaaaagcagcaagtctttgaaaaggagttggaagttaataagaccctgctggaaaacatacagaaaactggccaagagatgattgagggtggtcactatgcctctgacaatgtgaccactcgtctgagtgaagttgtcagcctctggaaggagttgatggaggctacagaacagaaagggacccagttgcatgaggccaaccagcagctgcaatttgaaaataatgcagaagatttgcagcactggctggaggatgttgagtggcaagtcacctctgaggattatgggaaaggcctggccgatgtacagaatcgactcaggaaacacggcctcctggagtcggctgtggctgctcgtcaggatcaggtggatacccttacagacctggctgcatattttgaagaaataggccatcctgattctaaggatataagggcaaggcaggagtcgttggtatgccgatttgaagctctgaaagagccactggccacccgaaagaagaatctcttagaccgtctccatctgcagctaatttgtagagacacagaggatgaggaggcctggatccaagagactgaaccctcagctacttccacctaccttggaaaggacctgattgcttccaaaaagcttctgaataggcacagagtcatcctggagaacattgccagccatgaaccacgcattcaagagataacagaaaggggaaacaagatggtagaggaaggacactttgctgcagaagatgtggcctctagggtcaagagtttgaaccagaatatggagtctctctgtgctcgagctgctaggcgacaaaataatcttgaagccaatgtccagttccagcagtacctggctgacctgcatgaagcagaaacatggatcagagagaaggagcctattgtagataatactaactatggggctgatgaagaagcagctggggctcttctaaagaagcatgaggcctttctattagatctcaattcatttggagacagtatgaaagctctacggaatcaggcaaacgcctgccagcaacaacaggctgcaccagtggagggagctgctggagaacaaagggtcatggctttatatgacttccaggcccgcagcccccgagaagtcaccatgaagaaaggtgatgtcttaacgctgctcagttccatcaataaggactggtggaaggtggaagctgctgatcatcagggcattgtcccagctgtctatgtcagaagactggcccacgatgagttcccgatgctcccacagcggcgacgagaagagccaggcaacatcacccagcgccaggagcagattgagaaccaataccgctccctcttggatcgggcagaagaacgcaggcgtcgtctattgcaacgttataatgaatttttattggcctatgaggcaggagacatgctggaatggattcaagagaaaaaggcagaaaacactggagtggaactagatgatgtttgggagctgcagaaaaagtttgatgagttccaaaaggatttgaataccaatgagcctcggctaagggatatcaacaaggtagctgatgatctactgtttgaaggacttctaacaccagaaggagctcaaatccggcaggaattgaatgcccgctggggttctttgcagaggcttgcagatgaacagcggcagctgctgggcagtgcccatgctgttgaagtgtttcacagagaagcagatgacacgaaggagcagattgagaagaaatgccaggccctcagtgctgcagaccctggctcagatctgttcagtgttcaggctcttcagcgacggcatgagggctttgaaagggacctcgtacccctgggagataaggtgaccatactgggggagacagcagagcggctcagtgagtcccatccagatgccactgaggacctgcagagacagaaaatggagctgaatgaggcctgggaagacctgcagggacgtacaaaggatcgtaaggagagcctaaatgaggcccagaaattctacctgttcctcagcaaggccagggatctgcagaactggatcagtaacattggtggcatggtatcatcacaggagctggccgaagacttaactggcatagagatcttgctggagagacatcaggagcaccatgctgacatggaggcaaaggctcccaccttccaggccttagaggacttcagtgcagaacttatcgacagtgggcaccatgctagccctgaaattgaaaaaaagcttcaagctgtcaagctagagagagatgatttggagaaggcttgggaacaacgcaagaagatcctagaccagtgcctggagttgcagatgttccaggggaactgtgatcaagttgagagctggatggtggcacgtgagaattccctgaggtcagatgacaaaggttccttagacagtctggaggccttgatgaagaaacgggaagatttggacaaagcaatcactgcccaggaagggaagatcactgacctagaacattttgctgagagcctcattgctgatgaacactatgccaaagaagagattgctactcggctgcaacgtgtactagacaggtggaaggctctcaaagcacaactgattgatgagcggacaaagcttggagactatgccgacctaaaacaattctaccaaaaccttgaggagctggaagaatggatcagtgagatgctgcccacagcctgtgatgaatcctacaaagaccccactaacattcagaggaaatacctgaaacaccagacctttgcaaatgaagtcgatggccgatctaagcaggtgcatgacgtcatcaacctggggaactccctgattgagcgtagcgcttgtgatggcaatgaagaggccatgaaggagcaactggaacggctgaaggaacattgggatcatctgcttgagagaacaaatgacaaagggcagaagctcaatgaggccagtcgtcagcagaggttcaacacaagcatccgggactttgagttctggctctcagaggcagagacattgctggccatgaaagatcaggccagggacttggcttcagcaggaaacctactcaagaagcatcagctattggagacagagatgttggctcgagaggatgcactcaaggacctgaatacattggctgaagatttgctctccagcgggactttcaacgttgatcagattatggagaaaaaagataatgtcaacaagcgtttcctgaatgtccaagaattggcagctgcacaccatgaaaaattgaaagaggcctatgccttgttccagttcttccaggatctagatgatgaggaatcctggatagaggagaagttgatacgagtgagctcccaggactatgggagagatcttcagggcgttcagaacttgctgaagaagcacaaacgcctagagggggagctggtggcacatgagcctgccatccagaatgtgctggatatggcagagaagctgaaagacaaggctgctgtggggcaagaggagatccagttgcggctggctcagtttgttgaacactgggagaagctcaaagagttggccaaggcccgaggacttaagttggaagaatccctagaatacttgcaattcatgcagaatgctgaggaagaggaagcttggatcaatgaaaagaatgctttggctgtccgaggagattctggagatacattagctgctactcagagcttgctaatgaagcatgaagctttggaaaatgactttgctgtccatgagacccgagtacaaaatgtgtgtgcacaaggagaagacatcctaaataaggtgagctatcagaacaaagagatttcttccaagatagaggctctgaatgaaaagaccccttctctggccaaggcaatagctgcttggaagttgcaattggaagacgattatgcctttcaggaattcaactggaaggctgatgtggtagaggcttggatagctgataaggaaacaagcctaaagaccaatggcaatggtgcagaccttggtgacttcctcactctcctggcgaaacaggacactctggatgccagtctgcagagtttccagcaagagagacttcccgagatcaccgacctgaaggacaaactgatttctgctcaacacaaccagtctaaagccattgaagagcgttatgccgctctgctgaagcgctgggaacagttgctggaagcctcggcagtccacagacagaaattgctggagaaacagctgcctctacagaaggctgaggacctgttcgtggaatttgcacataaggcttcagctttgaacaactggtgtgaaaagatggaagaaaacttgtcagagcctgtgcactgtgtctccctgaatgaaattcggcagctgcagaaagaccatgaggacttcttggcctccctggctggggctcaagcagactttaaatgtttgctggagctagaccagcagattaaggccttaggtgtgccttccagcccttatacctggttaacagtggaggtgctggaaaggacctggaagcacctatctgacatcattgaggaacgggagcaggagctgcaaaaggaagaggcaagacaggtcaagaactttgagatgtgtcaggagtttgaacagaatgccagtaccttccttcaatggatcctggaaaccagggcttactttctggatggatcattgctcaaagaaacaggaactctggaatctcagctggaagcaaataaaagaaaacagaaggagatccaggcgatgaagcgtcaactaaccaagattgtggacctgggggacaacttggaagacgctctgatccttgatatcaaatacagcaccattggattggctcagcagtgggaccagctctaccagcttgggttgcggatgcaacacaacctggagcaacagatccaggccaaggacaccaaaggtgtgagtgaagagaccctaaaggagtttagcacaatctataaacactttgatgagaatttgacagggcgcctgactcacaaagagttccggtcctgcctgagaggactcaattactacttgcccatggtggaggaggatgaacatgagcccaagtttgagaagttcctggatgctgtggatccagggaggaagggctatgtctcactggaggactatactgctttcctgattgacaaggagtcagaaaacatcaagtccagtgatgaaatagagaatgccttccaagccctggcggagggcaagtcatatattaccaaagaagacatgaagcaggcccttaccccagagcaagtgtcattctgtgccacacatatgcagcaatatatggacccacggggtcgaagccatctctctggctatgactacgttggcttcaccaattcctgctttggcaactaa

SEQ ID NO: 99 - DNA, 7260 bp, Pan troglodytes
atggagcaatttccaaaggaaaccgttgtggagagcagtgggccaaaggttttggaaacagcagaagagatccaggagaggcgtcaggaagtgttgactcggtatcaaagtttcaaggagcgggtcgctgagaggggtcagaagcttgaggattcctatcacttacaagttttcaagcgagatgcagatgatctggggaagtggatcatggagaaagtcaatattttaaccgataagagctatgaagacccaactaatatacaggggaaatatcagaagcatcaatcccttgaagcagaggtgcaaacaaaatcaagactcatgtctgagctggaaaaaacaagggaagaacgatttactatgggtcattctgcccacgaagaaacgaaggcccacatagaggagctacgccgcctgtgggacctgctgttagagctgaccctggagaagggtgccctgttgctgcgggccctgaagttccagcagtatgtacaggagtgtgctgacatcttagaatggattggagacaaggaggctatagcgacatcagtggagctaggtgaagactgggagcgcaccgaagttctgcataagaaatttgaagacttccaagtggagctggtagctaaagaagggagagttgttgaagtgaaccaatatgccaatgagtgtgctgaggaaaaccatcctgacctacccttaattcagtctaagcaaaatgaggtgaatgctgcctgggagcgccttcgtggtttggctctccagagacagaaagctctgtccaatgctgcagacttacaacgattcaaaagggatgtgactgaagccatccagtggatcaaggagaaggaacctgtactcacctccgaggactatggcaaagaccttgttgcctctgaaggactatttcacagtcacaagggacttgagagaaatcttgcagtcatgagtgacaaggtgaaggagttatgtgctaaagcagagaagctgacgctttcccatccttcagatgcacctcagatccaggagatgaaagaagatctggtcgccaactgggagcatattcgtgccctggccaccagcagatatgaaaaactgcaggctacttattggtaccatcgattctcatctgactttgatgaactctcaggctggatgaacgagaagactgctgcgatcaatgctgatgagctgccaacagatgtggctggtggagaagttctactggacaggcatcagcagcataagcatgagattgactcttacaatgaccgatttgaatctgctcgtgagactggtcaagacctcctgaatgccaatcatgaagcctccgatgaagttcgggaaaagatggaaatacttaccaaaaactgggctgccctgctggaactgtggaacaagcgtcatcatcagtatgagcagtgcttggactttcatctcttctacagagacagtgagcaagtggacagttggatgagtagacaagaggccttcctggaaaacgaggatctgggaaactcactgggcagtgcagaagcccttcttcagaagcatgaagactttgaggaagcctttactgcccaggaagagaagatcacaactgtagacaagactgcaaccaaattgattggtgataaccattatgattcagacaacatcgaggctatccgtgacgggctgttagcccggcgggatgccctacgtgaaaaggctgccactagacatagattgctgaaggagtcattgcttctgcaaaaactgtatgaggactcagatgacctaaagaactggatcaacaagaagaaaaagttggcagatgatgaagattacaaggacatacagaacttgaagagtagggttcaaaagcagcaagtctttgaaaaggagttggaagttaataagaccctgctggaaaacatacagaaaactggccaagagatgattgagggtggtcactatgcctctgacaatgtgaccactcgtctgagtgaagttgtcagcctctggaaggagttgatggaggctacagaacagaaagggacccagttgcatgaggccaaccagcagctgcaatttgaaaataatgcagaagatttgcagcactggctggaggatgttgagtggcaagtcacctctgaggattatgggaaaggcctggccgatgtacagaatcgactcaggaaacacggcctcctggagtcggctgtggctgctcgtcaggatcaggtggatacccttacagacctggctgcatattttgaagaaataggccatcctgattctaaggatataagggcaaggcaggagtcgttggtatgccgatttgaagctctgaaagagccactggccacccgaaagaagaatctcttagaccgtctccatctgcagctaatttgtagagacacagaggatgaggaggcctggatccaagagactgaaccctcagctacttccacctaccttggaaaggacctgattgcttccaaaaagcttctgaataggcacagagtcatcctggagaacattgccagccatgaaccacgcattcaagagataacagaaaggggaaacaagatggtagaggaaggacactttgctgcagaagatgtggcctctagggtcaagagtttgaaccagaatatggagtctctctgtgctcgagctgctaggcgacaaaataatcttgaagccaatgtccagttccagcagtacctggctgacctgcatgaagcagaaacatggatcagagagaaggagcctattgtagataatactaactatggggctgatgaagaagcagctggggctcttctaaagaagcatgaggcctttctattagatctcaattcatttggagacagtatgaaagctctacggaatcaggcaaacgcctgccagcaacaacaggctgcaccagtggagggagctgctggagaacaaagggtcatggctttatatgacttccaggcccgcagcccccgagaagtcaccatgaagaaaggtgatgtcttaacgctgctcagttccatcaataaggactggtggaaggtggaagctgctgatcatcagggcattgtcccagctgtctatgtcagaagactggcccacgatgagttcccgatgctcccacagcggcgacgagaagagccaggcaacatcacccagcgccaggagcagattgagaaccaataccgctccctcttggatcgggcagaagaacgcaggcgtcgtctattgcaacgttataatgaatttttattggcctatgaggcaggagacatgctggaatggattcaagagaaaaaggcagaaaacactggagtggaactagatgatgtttgggagctgcagaaaaagtttgatgagttccaaaaggatttgaataccaatgagcctcggctaagggatatcaacaaggtagctgatgatctactgtttgaaggacttctaacaccagaaggagctcaaatccggcaggaattgaatgcccgctggggttctttgcagaggcttgcagatgaacagcggcagctgctgggcagtgcccatgctgttgaagtgtttcacagagaagcagatgacacgaaggagcagattgagaagaaatgccaggccctcagtgctgcagaccctggctcagatctgttcagtgttcaggctcttcagcgacggcatgagggctttgaaagggacctcgtacccctgggagataaggtgaccatactgggggagacagcagagcggctcagtgagtcccatccagatgccactgaggacctgcagagacagaaaatggagctgaatgaggcctgggaagacctgcagggacgtacaaaggatcgtaaggagagcctaaatgaggcccagaaattctacctgttcctcagcaaggccagggatctgcagaactggatcagtaacattggtggcatggtatcatcacaggagctggccgaagacttaactggcatagagatcttgctggagagacatcaggagcaccatgctgacatggaggcaaaggctcccaccttccaggccttagaggacttcagtgcagaacttatcgacagtgggcaccatgctagccctgaaattgaaaaaaagcttcaagctgtcaagctagagagagatgatttggagaaggcttgggaacaacgcaagaagatcctagaccagtgcctggagttgcagatgttccaggggaactgtgatcaagttgagagctggatggtggcacgtgagaattccctgaggtcagatgacaaaggttccttagacagtctggaggccttgatgaagaaacgggaagatttggacaaagcaatcactgcccaggaagggaagatcactgacctagaacattttgctgagagcctcattgctgatgaacactatgccaaagaagagattgctactcggctgcaacgtgtactagacaggtggaaggctctcaaagcacaactgattgatgagcggacaaagcttggagactatgccgacctaaaacaattctaccaaaaccttgaggagctggaagaatggatcagtgagatgctgcccacagcctgtgatgaatcctacaaagaccccactaacattcagaggaaatacctgaaacaccagacctttgcaaatgaagtcgatggccgatctaagcaggtgcatgacgtcatcaacctggggaactccctgattgagcgtagcgcttgtgatggcaatgaagaggccatgaaggagcaactggaacggctgaaggaacattgggatcatctgcttgagagaacaaatgacaaagggcagaagctcaatgaggccagtcgtcagcagaggttcaacacaagcatccgggactttgagttctggctctcagaggcagagacattgctggccatgaaagatcaggccagggacttggcttcagcaggaaacctactcaagaagcatcagctattggagacagagatgttggctcgagaggatgcactcaaggacctgaatacattggctgaagatttgctctccagcgggactttcaacgttgatcagattatggagaaaaaagataatgtcaacaagcgtttcctgaatgtccaagaattggcagctgcacaccatgaaaaattgaaagaggcctatgccttgttccagttcttccaggatctagatgatgaggaatcctggatagaggagaagttgatacgagtgagctcccaggactatgggagagatcttcagggcgttcagaacttgctgaagaagcacaaacgcctagagggggagctggtggcacatgagcctgccatccagaatgtgctggatatggcagagaagctgaaagacaaggctgctgtggggcaagaggagatccagttgcggctggctcagtttgttgaacactgggagaagctcaaagagttggccaaggcccgaggacttaagttggaagaatccctagaatacttgcaattcatgcagaatgctgaggaagaggaagcttggatcaatgaaaagaatgctttggctgtccgaggagattctggagatacattagctgctactcagagcttgctaatgaagcatgaagctttggaaaatgactttgctgtccatgagacccgagtacaaaatgtgtgtgcacaaggagaagacatcctaaataaggtgttgcaggaggaaagtcagaacaaagagatttcttccaagatagaggctctgaatgaaaagaccccttctctggccaaggcaatagctgcttggaagttgcaattggaagacgattatgcctttcaggaattcaactggaaggctgatgtggtagaggcttggatagctgataaggaaacaagcctaaagaccaatggcaatggtgcagaccttggtgacttcctcactctcctggcgaaacaggacactctggatgccagtctgcagagtttccagcaagagagacttcccgagatcaccgacctgaaggacaaactgatttctgctcaacacaaccagtctaaagccattgaagagcgttatgccgctctgctgaagcgctgggaacagttgctggaagcctcggcagtccacagacagaaattgctggagaaacagctgcctctacagaaggctgaggacctgttcgtggaatttgcacataaggcttcagctttgaacaactggtgtgaaaagatggaagaaaacttgtcagagcctgtgcactgtgtctccctgaatgaaattcggcagctgcagaaagaccatgaggacttcttggcctccctggctggggctcaagcagactttaaatgtttgctggagctagaccagcagattaaggccttaggtgtgccttccagcccttatacctggttaacagtggaggtgctggaaaggacctggaagcacctatctgacatcattgaggaacgggagcaggagctgcaaaaggaagaggcaagacaggtcaagaactttgagatgtgtcaggagtttgaacagaatgccagtaccttccttcaatggatcctggaaaccagggcttactttctggatggatcattgctcaaagaaacaggaactctggaatctcagctggaagcaaataaaagaaaacagaaggagatccaggcgatgaagcgtcaactaaccaagattgtggacctgggggacaacttggaagacgctctgatccttgatatcaaatacagcaccattggattggctcagcagtgggaccagctctaccagcttgggttgcggatgcaacacaacctggagcaacagatccaggccaaggacaccaaaggtgtgagtgaagagaccctaaaggagtttagcacaatctataaacactttgatgagaatttgacagggcgcctgactcacaaagagttccggtcctgcctgagaggactcaattactacttgcccatggtggaggaggatgaacatgagcccaagtttgagaagttcctggatgctgtggatccagggaggaagggctatgtctcactggaggactatactgctttcctgattgacaaggagtcagaaaacatcaagtccagtgatgaaatagagaatgccttccaagccctggcggagggcaagtcatatattaccaaagaagacatgaagcaggcccttaccccagagcaagtgtcattctgtgccacacatatgcagcaatatatggacccacggggtcgaagccatctctctggctatgactacgttggcttcaccaattcctgctttggcaactaa

SEQ ID NO: 100 - DNA, 6414 bp, Pan troglodytes
atgacatcggccacagagtttgaaaatgtgggcaaccagccaccttacagcaggatcaatgcccgctgggacgccccagacgacgagctggataatgacaacagctcagccaggctctttgagaggtcccggataaaggccttggcagatgagcgggaagttgttcagaaaaagaccttcacgaaatgggtgaactcgcacctggctcgagtgtcctgccgcatcaccgatctctacaaggacctgcgggatgggcgcatgctcatcaagctgctggaggtgctctctggagagatgctgccaaagcccaccaaggggaagatgcgcatccactgcctggagaacgtggacaaggctctccagttcctcaaggagcagcgtgtacacctggagaacatgggctcccacgacattgtagacggcaaccaccgcctggtcctgggcctcatctggaccatcatcctccgcttccagattcaggacattgtggtcgaaactcaggaaggtcgtgaaacacgctcagccaaggatgcgttgctgttgtggtgtcagatgaagacggcaggctaccctcatgtcaatatcaccaactttacctccagctggaaggatggcttggcctttaatgccctgatacacaagcaccggcccgacctgatcgactttgataagctgaaggactccaatgcccggcacaacctggagcacgcattcgatgtggctgagcgccagctgggcatcatcccgctcctcgaccccgaagatgtctttacggaaaaccctgatgagaaatccatcatcacctatgtggtggccttttaccactacttctccaagatgaaggtgctggcagtggagggcaagcgtgtcggcaaggttattgaccatgccattgagactgagaagatgattgaaaagtacagcgggctagcctcggacctgctcacctggatcgagcagaccatcactgtcctgaacagccgcaagtttgccaactcgctgacgggcgtccagcagcagctgcaggccttcagcacctaccgcaccgtggagaagccgcccaagtttcaagagaaggggaatctggaagttctactttttaccatccagtcccggatgagagccaacaatcagaaagtgtacacaccccacgatgggaaactagtgtctgacatcaacagggcctgggaaagcctggaggaagctgagtatcggcgggagctggccctgagaaatgagctcattcggcaggagaagctagagcaactggcccggcgctttgaccggaaggccgcaatgagagagacctggctcaatgaaaaccagcgcctcgtggcccaggataactttgggtatgacctggcagctgtggaggccgccaagaagaagcatgaggccatcgagaccgacacagctgcctacgaggagcgggtgagagccctggaggacctggctcaggagctggagaaagagaactaccatgaccagaagcgcatcacggcccgcaaggacaatatactgcgcctatggagctacctgcaggagctgctgcagtcccggcgccagaggctcgagaccaccctggcactgcagaagctcttccaggacatgctgcacagcatcaactggatggatgagatcaaggctcacctcttgtctgccgagtttgggaagcacttgttggaggttgaagacctgctacagaagcacaagttgatggaagctgacatcgccatccaaggggacaaagtgaaggccatcaccgcagccaccctgaagttcaccgaggggaaagggtaccagccttgtgacccccaggtcatccaggaccgcatcagccacttggagcagtgctttgaggagctgagcaacatggcagctgggcggaaggcccaactggagcagtccaaacgactctggaagttcttctgggagatggatgaggctgagagctggatcaaggagaaggagcagatctattcttccctggactatggcaaagacctgaccagtgtgctcatcttacagcgcaagcacaaggcctttgaggatgagctccgtgggctggatgctcacctggagcagatcttccaggaggctcatgacatggttgcacgcaagcagtttgggcacccgcatatcgaggcccgcatcaaggaggtgtcggcacagtgggaccagctgaaggacctggctgccttctgcaagaagaacctccaggatgctgagaactttttccagttccagggcgatgcagatgacctgaaggcttggctgcaagacgcccaccggctgctctctggtgaagatgtggggcaggacgaaggggccacacgggccctggggaaaaagcacaaggacttcctggaggagctggaggagagccgtggggtgatggagcacctggagcagcaggcccagggattccccgaagagtttcgggattccccagatgtgacccatcggctgcaggccctgcgggagctctaccaacaggtggtggcccaggcggacctgcgtcaacagaggctgcaggaagccctggacctgtacacggtgttcggggagacagacgcctgtgagctgtggatgggagagaaggagaagtggctggccgagatggaaatgccagacaccctggaggacctggaggtcgtgcagcacaggttcgacatcctggaccaggagatgaagaccttgatgactcagattgatggtgtgaacctcgctgccaacagcttggtagagagtggccacccacgcagcagggaggtgaagcagtaccaggaccatctgaacaccaggtggcaggcatttcagaccctggtgtcagagcggcgggaggctgtggactcagccctccgagtgcacaactactgcgtggattgcgaggagaccagcaagtggatcacggacaagacaaaggtagtggagtccacaaaagacctggggcgggacctggcaggtatcatcgccatccagcggaagttgtcagggctggagcgtgacgtggccgccatccaggcccgtgtggatgccctggagcgtgagtcccagcagctgatggactcgcaccctgagcagaaggaggacattggtcagcggcaaaaacacttggaggagctgtggcagggcctgcagcaatccctgcagggccaggaggacttgctgggggaagtcagccagctgcaggccttcctgcaggatctggatgacttccaggcctggctctccatcacccagaaggctgtggcctctgaggacatgcccgaatccctccctgaggctgagcagctcctgcagcagcatgcaggtatcaaggatgagattgacgggcaccaagacagctaccagcgtgttaaggagtctggggagaaagtgatccaaggccagacggacccagagtatctgcttctgggccagcggctggagggcctggatactggctgggatgccctgggcaggatgtgggagagccgcagccacaccctcgctcagtgccttggcttccaggagttccagaaagatgccaagcaggctgaagccatcctcagcaaccaggaatacactctggctcacttggagcccccagactccctggaagctgcagaggctgggatccggaagtttgaggatttcttggggtctatggagaacaaccgggataaggtcttgagtcctgtggactctggaaacaagctggtagctgagggaaacctatactcagacaagatcaaggagaaggtgcagctgattgaggacaggcacaggaagaacaacgagaaggcccaggaggcctctgtcctactgagagacaacctggagctacagaacttcctccagaactgccaggagctcactctttggatcaacgacaagctgctgacatctcaggatgtctcctatgatgaagcacgaaaccttcacaataaatggctaaagcaccaggcgtttgtggcagagctggcttcccatgaagggtggctagagaacatcgatgcggaaggaaagcagctgatggatgagaagccccagtttacagccctggtgtcccaaaagctggaagccctgcaccggctctgggacgagctgcaggccaccacaaaggagaagacccagcacctctcggctgccaggagctccgacctgcgcttgcagacccatgctgacctcaacaagtggatcagcgccatggaggaccagctgcggtcagacgacccgggcaaggacctgaccagtgtcaatcggatgttggctaagctgaagcgagtggaggaccaagtgaatgtgcggaaagaggagctgggggagctgtttgcccaggtgccttcaatgggagaggagggaggagatgcagacttgagcatcgagaagcggttcctggacctcctggaacccctaggaaggaggaagaagcagctggaatcatccagagccaagctgcagatcagccgggacttagaggatgagacgctctgggtggaggagaggctgcctctggcccagtcagccgactatggcactaatctgcaaactgtgcaactgttcatgaagaagaaccagacactgcagaatgagattctgggccatacgccgcgggttgaggatgtgctgcagagagggcagcagctggtggaggcggcggagatcgactgccaggaccttgaggagcgcctggggcacctgcagagctcctgggacaggctgcgggaggcagcggccgggaggctgcagcgactgagggacgccaacgaggcacagcagtactacctggatgcggacgaggctgaggcctggattggcgagcaggagctctacgtcatctccgatgagatccccaaggatgaagagggcgccatcgtgatgctgaagcgacatttgcggcagcagcgtgcggtggaggactacggccggaacatcaagcagctggccagccgggcccagggcctgctgtctgcaggccaccctgagggggaacagatcatcagacttcaggggcaagtggacaagcactacgcagggctgaaggacgtggcggaagagcgcaagcgcaagctggagaacatgtaccacctgttccagctcaagcgggagaccgacgacctggagcagtggatttcagaaaaggagctggtggcctcttccccagaaatggggcaagactttgaccacgtgactcttctgcgggacaagttccgggactttgcccgggagaccggggcgattgggcaggagcgggtggacaatgtgaatgccttcatcgagcgactcatcgacgcgggccacagcgaggcggccaccattgccgagtggaaggacgggctgaacgagatgtgggcagacctcctggagctcattgacacgcgcatgcagctgctggccgcctcctatgacctgcaccgctacttctacacgggtgccgagatcctgggcctcatcgacgagaagcaccgcgagctgcccgaggacgtggggctggacgccagcacggccgagtccttccaccgggtgcacacagccttcgagcgggagctccacctgctgggtgtccaggtgcagcagttccaggacgtggccacccgtctgcagacagcatatgctggggagaaggcagaggccatccagaacaaggagcaggaggtgtctgccgcgtggcaggcgctgctcgatgcctgtgccgggcgccggacccagctagtggacacggcggataaattccgcttcttcagcatggcccgtgacctcctctcctggatggagagcatcatccggcagatcgagacccaggagaggcccagggatgtctcctctgtggaactgctcatgaagtatcaccagggcatcaatgcagagattgaaacccggagcaagaacttcagtgcctgcctggagcttggcgagtccctgctgcagcggcagcaccaggcctcagaggagatccgcgagaaactgcagcaggtgatgtccaggaggaaagagatgaatgagaagtgggaagcccgctgggagcggctccgcatgttgctggaggtgtgccagttctcgagggatgcctctgtggctgaggcgtggctgattgcccaggagccctacctggccagcggggactttggacacacagtggacagtgtggagaagctcatcaagaggcatgaggcttttgagaagtccacggccagctgggcagagcgctttgctgccctggagaagcccaccacgcttgagctgaaagaacgccagattgcagagagacccgcagaggagactgggcctcaagaggaggaaggtgagacagcaggggaggctccggtttcccaccatgcggccaccgagagaacgtccccggtcagtctctggtctcgtttgtctagttcctgggagtcactgcagccagagccctctcacccctactag

SEQ ID NO: 101 - DNA, 7017 bp, Pan troglodytes
atgacatcggccacagagtttgaaaatgtgggcaaccagccaccttacagcaggatcaatgcccgctgggacgccccagacgacgagctggataatgacaacagctcagccaggctctttgagaggtcccggataaaggccttggcagatgagcgggaagttgttcagaaaaagaccttcacgaaatgggtgaactcgcacctggctcgagtgtcctgccgcatcaccgatctctacaaggacctgcgggatgggcgcatgctcatcaagctgctggaggtgctctctggagagatgctgccaaagcccaccaaggggaagatgcgcatccactgcctggagaacgtggacaaggctctccagttcctcaaggagcagcgtgtacacctggagaacatgggctcccacgacattgtagacggcaaccaccgcctggtcctgggcctcatctggaccatcatcctccgcttccagattcaggacattgtggtcgaaactcaggaaggtcgtgaaacacgctcagccaaggatgcgttgctgttgtggtgtcagatgaagacggcaggctaccctcatgtcaatatcaccaactttacctccagctggaaggatggcttggcctttaatgccctgatacacaagcaccggcccgacctgatcgactttgataagctgaaggactccaatgcccggcacaacctggagcacgcattcgatgtggctgagcgccagctgggcatcatcccgctcctcgaccccgaagatgtctttacggaaaaccctgatgagaaatccatcatcacctatgtggtggccttttaccactacttctccaagatgaaggtgctggcagtggagggcaagcgtgtcggcaaggttattgaccatgccattgagactgagaagatgattgaaaagtacagcgggctagcctcggacctgctcacctggatcgagcagaccatcactgtcctgaacagccgcaagtttgccaactcgctgacgggcgtccagcagcagctgcaggccttcagcacctaccgcaccgtggagaagccgcccaagtttcaagagaaggggaatctggaagttctactttttaccatccagtcccggatgagagccaacaatcagaaagtgtacacaccccacgatgggaaactagtgtctgacatcaacagggcctgggaaagcctggaggaagctgagtatcggcgggagctggccctgagaaatgagctcattcggcaggagaagctagagcaactggcccggcgctttgaccggaaggccgcaatgagagagacctggctcaatgaaaaccagcgcctcgtggcccaggataactttgggtatgacctggcagctgtggaggccgccaagaagaagcatgaggccatcgagaccgacacagctgcctacgaggagcgggtgagagccctggaggacctggctcaggagctggagaaagagaactaccatgaccagaagcgcatcacggcccgcaaggacaatatactgcgcctatggagctacctgcaggagctgctgcagtcccggcgccagaggctcgagaccaccctggcactgcagaagctcttccaggacatgctgcacagcatcaactggatggatgagatcaaggctcacctcttgtctgccgagtttgggaagcacttgttggaggttgaagacctgctacagaagcacaagttgatggaagctgacatcgccatccaaggggacaaagtgaaggccatcaccgcagccaccctgaagttcaccgaggggaaagggtaccagccttgtgacccccaggtcatccaggaccgcatcagccacttggagcagtgctttgaggagctgagcaacatggcagctgggcggaaggcccaactggagcagtccaaacgactctggaagttcttctgggagatggatgaggctgagagctggatcaaggagaaggagcagatctattcttccctggactatggcaaagacctgaccagtgtgctcatcttacagcgcaagcacaaggcctttgaggatgagctccgtgggctggatgctcacctggagcagatcttccaggaggctcatgacatggttgcacgcaagcagtttgggcacccgcatatcgaggcccgcatcaaggaggtgtcggcacagtgggaccagctgaaggacctggctgccttctgcaagaagaacctccaggatgctgagaactttttccagttccagggcgatgcagatgacctgaaggcttggctgcaagacgcccaccggctgctctctggtgaagatgtggggcaggacgaaggggccacacgggccctggggaaaaagcacaaggacttcctggaggagctggaggagagccgtggggtgatggagcacctggagcagcaggcccagggattccccgaagagtttcgggattccccagatgtgacccatcggctgcaggccctgcgggagctctaccaacaggtggtggcccaggcggacctgcgtcaacagaggctgcaggaagccctggacctgtacacggtgttcggggagacagacgcctgtgagctgtggatgggagagaaggagaagtggctggccgagatggaaatgccagacaccctggaggacctggaggtcgtgcagcacaggttcgacatcctggaccaggagatgaagaccttgatgactcagattgatggtgtgaacctcgctgccaacagcttggtagagagtggccacccacgcagcagggaggtgaagcagtaccaggaccatctgaacaccaggtggcaggcatttcagaccctggtgtcagagcggcgggaggctgtggactcagccctccgagtgcacaactactgcgtggattgcgaggagaccagcaagtggatcacggacaagacaaaggtagtggagtccacaaaagacctggggcgggacctggcaggtatcatcgccatccagcggaagttgtcagggctggagcgtgacgtggccgccatccaggcccgtgtggatgccctggagcgtgagtcccagcagctgatggactcgcaccctgagcagaaggaggacattggtcagcggcaaaaacacttggaggagctgtggcagggcctgcagcaatccctgcagggccaggaggacttgctgggggaagtcagccagctgcaggccttcctgcaggatctggatgacttccaggcctggctctccatcacccagaaggctgtggcctctgaggacatgcccgaatccctccctgaggctgagcagctcctgcagcagcatgcaggtatcaaggatgagattgacgggcaccaagacagctaccagcgtgttaaggagtctggggagaaagtgatccaaggccagacggacccagagtatctgcttctgggccagcggctggagggcctggatactggctgggatgccctgggcaggatgtgggagagccgcagccacaccctcgctcagtgccttggcttccaggagttccagaaagatgccaagcaggctgaagccatcctcagcaaccaggaatacactctggctcacttggagcccccagactccctggaagctgcagaggctgggatccggaagtttgaggatttcttggggtctatggagaacaaccgggataaggtcttgagtcctgtggactctggaaacaagctggtagctgagggaaacctatactcagacaagatcaaggagaaggtgcagctgattgaggacaggcacaggaagaacaacgagaaggcccaggaggcctctgtcctactgagagacaacctggagctacagaacttcctccagaactgccaggagctcactctttggatcaacgacaagctgctgacatctcaggatgtctcctatgatgaagcacgaaaccttcacaataaatggctaaagcaccaggcgtttgtggcagagctggcttcccatgaagggtggctagagaacatcgatgcggaaggaaagcagctgatggatgagaagccccagtttacagccctggtgtcccaaaagctggaagccctgcaccggctctgggacgagctgcaggccaccacaaaggagaagacccagcacctctcggctgccaggagctccgacctgcgcttgcagacccatgctgacctcaacaagtggatcagcgccatggaggaccagctgcggtcagacgacccgggcaaggacctgaccagtgtcaatcggatgttggctaagctgaaggcactggaggaccaagtgaatgtgcggaaagaggagctgggggagctgtttgcccaggtgccttcaatgggagaggagggaggagatgcagacttgagcatcgagaagcggttcctggacctcctggaacccctaggaaggaggaagaagcagctggaatcatccagagccaagctgcagatcagccgggacttagaggatgagacgctctgggtggaggagaggctgcctctggcccagtcagccgactatggcactaatctgcaaactgtgcaactgttcatgaagaagaaccagacactgcagaatgagattctgggccatacgccgcgggttgaggatgtgctgcagagagggcagcagctggtggaggcggcggagatcgactgccaggaccttgaggagcgcctggggcacctgcagagctcctgggacaggctgcgggaggcagcggccgggaggctgcagcgactgagggacgccaacgaggcacagcagtactacctggatgcggacgaggctgaggcctggattggcgagcaggagctctacgtcatctccgatgagatccccaaggatgaagagggcgccatcgtgatgctgaagcgacatttgcggcagcagcgtgcggtggaggactacggccggaacatcaagcagctggccagccgggcccagggcctgctgtctgcaggccaccctgagggggaacagatcatcagacttcaggggcaagtggacaagcactacgcagggctgaaggacgtggcggaagagcgcaagcgcaagctggagaacatgtaccacctgttccagctcaagcgggagaccgacgacctggagcagtggatttcagaaaaggagctggtggcctcttccccagaaatggggcaagactttgaccacgtgactcttctgcgggacaagttccgggactttgcccgggagaccggggcgattgggcaggagcgggtggacaatgtgaatgccttcatcgagcgactcatcgacgcgggccacagcgaggcggccaccattgccgagtggaaggacgggctgaacgagatgtgggcagacctcctggagctcattgacacgcgcatgcagctgctggccgcctcctatgacctgcaccgctacttctacacgggtgccgagatcctgggcctcatcgacgagaagcaccgcgagctgcccgaggacgtggggctggacgccagcacggccgagtccttccaccgggtgcacacagccttcgagcgggagctccacctgctgggtgtccaggtgcagcagttccaggacgtggccacccgtctgcagacagcatatgctggggagaaggcagaggccatccagaacaaggagcaggaggtgtctgccgcgtggcaggcgctgctcgatgcctgtgccgggcgccggacccagctagtggacacggcggataaattccgcttcttcagcatggcccgtgacctcctctcctggatggagagcatcatccggcagatcgagacccaggagaggcccagggatgtctcctctgtggaactgctcatgaagtatcaccagggcatcaatgcagagattgaaacccggagcaagaacttcagtgcctgcctggagcttggcgagtccctgctgcagcggcagcaccaggcctcagaggagatccgcgagaaactgcagcaggtgatgtccaggaggaaagagatgaatgagaagtgggaagcccgctgggagcggctccgcatgttgctggaggtgtgccagttctcgagggatgcctctgtggctgaggcgtggctgattgcccaggagccctacctggccagcggggactttggacacacagtggacagtgtggagaagctcatcaagaggcatgaggcttttgagaagtccacggccagctgggcagagcgctttgctgccctggagaagcccaccacggtgagcagggaacagtgctgggaggctcaggaggatgagctggcgcagccccgccctccatcctccccacatccctgcacccacctggctctagaaggctcctcgcaagcccagtggctgacgggagatgggaaagaagtatgccctgaaggaggcccaggtctgcgagggagccctcggcacaggccctccccagatgtatacccaagtcagagcgcaggatccacagaaagaccccaagcccaggcttccagtcccatcccttgtccggctgcagcaaggggaggggccagagctttgccaggtgatgagcccgcaacgctgctggccccgcgggaccatgggcagagtgtgcagatggaaggctacctgggccgcaagcatgacttggaggggcccaacaagaaggcttccaacaggtcctggaacaacctgtactgtgtgctcaggaacagtgagctaaccttctacaaggatgccaagaacctggccctggggatgccctaccatggggaggaacccctggccctgagacatgccatctgtgagattgctgccaactacaagaagaagaagcacgtctttaagctgaggctgagtaatggcagcgagtggctcttccatggcaaggatgaggaggagatgctgtcctggctgcagggcgtgagcaccgccatcaacgagtcccagagcatccgcatcaaggcgcagagcctgcccctgccttccctctccggccccgacgccagcctcggcaagaaggagaagagattcagcttcttccccaaaaagaagtag

SEQ ID NO: 102 - DNA, 7083 bp, Pan troglodytes
atgacatcggccacagagtttgaaaatgtgggcaaccagccaccttacagcaggatcaatgcccgctgggacgccccagacgacgagctggataatgacaacagctcagccaggctctttgagaggtcccggataaaggccttggcagatgagcgggaagttgttcagaaaaagaccttcacgaaatgggtgaactcgcacctggctcgagtgtcctgccgcatcaccgatctctacaaggacctgcgggatgggcgcatgctcatcaagctgctggaggtgctctctggagagatgctgccaaagcccaccaaggggaagatgcgcatccactgcctggagaacgtggacaaggctctccagttcctcaaggagcagcgtgtacacctggagaacatgggctcccacgacattgtagacggcaaccaccgcctggtcctgggcctcatctggaccatcatcctccgcttccagattcaggacattgtggtcgaaactcaggaaggtcgtgaaacacgctcagccaaggatgcgttgctgttgtggtgtcagatgaagacggcaggctaccctcatgtcaatatcaccaactttacctccagctggaaggatggcttggcctttaatgccctgatacacaagcaccggcccgacctgatcgactttgataagctgaaggactccaatgcccggcacaacctggagcacgcattcgatgtggctgagcgccagctgggcatcatcccgctcctcgaccccgaagatgtctttacggaaaaccctgatgagaaatccatcatcacctatgtggtggccttttaccactacttctccaagatgaaggtgctggcagtggagggcaagcgtgtcggcaaggttattgaccatgccattgagactgagaagatgattgaaaagtacagcgggctagcctcggacctgctcacctggatcgagcagaccatcactgtcctgaacagccgcaagtttgccaactcgctgacgggcgtccagcagcagctgcaggccttcagcacctaccgcaccgtggagaagccgcccaagtttcaagagaaggggaatctggaagttctactttttaccatccagtcccggatgagagccaacaatcagaaagtgtacacaccccacgatgggaaactagtgtctgacatcaacagggcctgggaaagcctggaggaagctgagtatcggcgggagctggccctgagaaatgagctcattcggcaggagaagctagagcaactggcccggcgctttgaccggaaggccgcaatgagagagacctggctcaatgaaaaccagcgcctcgtggcccaggataactttgggtatgacctggcagctgtggaggccgccaagaagaagcatgaggccatcgagaccgacacagctgcctacgaggagcgggtgagagccctggaggacctggctcaggagctggagaaagagaactaccatgaccagaagcgcatcacggcccgcaaggacaatatactgcgcctatggagctacctgcaggagctgctgcagtcccggcgccagaggctcgagaccaccctggcactgcagaagctcttccaggacatgctgcacagcatcaactggatggatgagatcaaggctcacctcttgtctgccgagtttgggaagcacttgttggaggttgaagacctgctacagaagcacaagttgatggaagctgacatcgccatccaaggggacaaagtgaaggccatcaccgcagccaccctgaagttcaccgaggggaaagggtaccagccttgtgacccccaggtcatccaggaccgcatcagccacttggagcagtgctttgaggagctgagcaacatggcagctgggcggaaggcccaactggagcagtccaaacgactctggaagttcttctgggagatggatgaggctgagagctggatcaaggagaaggagcagatctattcttccctggactatggcaaagacctgaccagtgtgctcatcttacagcgcaagcacaaggcctttgaggatgagctccgtgggctggatgctcacctggagcagatcttccaggaggctcatgacatggttgcacgcaagcagtttgggcacccgcatatcgaggcccgcatcaaggaggtgtcggcacagtgggaccagctgaaggacctggctgccttctgcaagaagaacctccaggatgctgagaactttttccagttccagggcgatgcagatgacctgaaggcttggctgcaagacgcccaccggctgctctctggtgaagatgtggggcaggacgaaggggccacacgggccctggggaaaaagcacaaggacttcctggaggagctggaggagagccgtggggtgatggagcacctggagcagcaggcccagggattccccgaagagtttcgggattccccagatgtgacccatcggctgcaggccctgcgggagctctaccaacaggtggtggcccaggcggacctgcgtcaacagaggctgcaggaagccctggacctgtacacggtgttcggggagacagacgcctgtgagctgtggatgggagagaaggagaagtggctggccgagatggaaatgccagacaccctggaggacctggaggtcgtgcagcacaggttcgacatcctggaccaggagatgaagaccttgatgactcagattgatggtgtgaacctcgctgccaacagcttggtagagagtggccacccacgcagcagggaggtgaagcagtaccaggaccatctgaacaccaggtggcaggcatttcagaccctggtgtcagagcggcgggaggctgtggactcagccctccgagtgcacaactactgcgtggattgcgaggagaccagcaagtggatcacggacaagacaaaggtagtggagtccacaaaagacctggggcgggacctggcaggtatcatcgccatccagcggaagttgtcagggctggagcgtgacgtggccgccatccaggcccgtgtggatgccctggagcgtgagtcccagcagctgatggactcgcaccctgagcagaaggaggacattggtcagcggcaaaaacacttggaggagctgtggcagggcctgcagcaatccctgcagggccaggaggacttgctgggggaagtcagccagctgcaggccttcctgcaggatctggatgacttccaggcctggctctccatcacccagaaggctgtggcctctgaggacatgcccgaatccctccctgaggctgagcagctcctgcagcagcatgcaggtatcaaggatgagattgacgggcaccaagacagctaccagcgtgttaaggagtctggggagaaagtgatccaaggccagacggacccagagtatctgcttctgggccagcggctggagggcctggatactggctgggatgccctgggcaggatgtgggagagccgcagccacaccctcgctcagtgccttggcttccaggagttccagaaagatgccaagcaggctgaagccatcctcagcaaccaggaatacactctggctcacttggagcccccagactccctggaagctgcagaggctgggatccggaagtttgaggatttcttggggtctatggagaacaaccgggataaggtcttgagtcctgtggactctggaaacaagctggtagctgagggaaacctatactcagacaagatcaaggagaaggtgcagctgattgaggacaggcacaggaagaacaacgagaaggcccaggaggcctctgtcctactgagagacaacctggagctacagaacttcctccagaactgccaggagctcactctttggatcaacgacaagctgctgacatctcaggatgtctcctatgatgaagcacgaaaccttcacaataaatggctaaagcaccaggcgtttgtggcagagctggcttcccatgaagggtggctagagaacatcgatgcggaaggaaagcagctgatggatgagaagccccagtttacagccctggtgtcccaaaagctggaagccctgcaccggctctgggacgagctgcaggccaccacaaaggagaagacccagcacctctcggctgccaggagctccgacctgcgcttgcagacccatgctgacctcaacaagtggatcagcgccatggaggaccagctgcggtcagacgacccgggcaaggacctgaccagtgtcaatcggatgttggctaagctgaagcgagtggaggaccaagtgaatgtgcggaaagaggagctgggggagctgtttgcccaggtgccttcaatgggagaggagggaggagatgcagacttgagcatcgagaagcggttcctggacctcctggaacccctaggaaggaggaagaagcagctggaatcatccagagccaagctgcagatcagccgggacttagaggatgagacgctctgggtggaggagaggctgcctctggcccagtcagccgactatggcactaatctgcaaactgtgcaactgttcatgaagaagaaccagacactgcagaatgagattctgggccatacgccgcgggttgaggatgtgctgcagagagggcagcagctggtggaggcggcggagatcgactgccaggaccttgaggagcgcctggggcacctgcagagctcctgggacaggctgcgggaggcagcggccgggaggctgcagcgactgagggacgccaacgaggcacagcagtactacctggatgcggacgaggctgaggcctggattggcgagcaggagctctacgtcatctccgatgagatccccaaggatgaagagggcgccatcgtgatgctgaagcgacatttgcggcagcagcgtgcggtggaggactacggccggaacatcaagcagctggccagccgggcccagggcctgctgtctgcaggccaccctgagggggaacagatcatcagacttcaggggcaagtggacaagcactacgcagggctgaaggacgtggcggaagagcgcaagcgcaagctggagaacatgtaccacctgttccagctcaagcgggagaccgacgacctggagcagtggatttcagaaaaggagctggtggcctcttccccagaaatggggcaagactttgaccacgtgactcttctgcgggacaagttccgggactttgcccgggagaccggggcgattgggcaggagcgggtggacaatgtgaatgccttcatcgagcgactcatcgacgcgggccacagcgaggcggccaccattgccgagtggaaggacgggctgaacgagatgtgggcagacctcctggagctcattgacacgcgcatgcagctgctggccgcctcctatgacctgcaccgctacttctacacgggtgccgagatcctgggcctcatcgacgagaagcaccgcgagctgcccgaggacgtggggctggacgccagcacggccgagtccttccaccgggtgcacacagccttcgagcgggagctccacctgctgggtgtccaggtgcagcagttccaggacgtggccacccgtctgcagacagcatatgctggggagaaggcagaggccatccagaacaaggagcaggaggtgtctgccgcgtggcaggcgctgctcgatgcctgtgccgggcgccggacccagctagtggacacggcggataaattccgcttcttcagcatggcccgtgacctcctctcctggatggagagcatcatccggcagatcgagacccaggagaggcccagggatgtctcctctgtggaactgctcatgaagtatcaccagggcatcaatgcagagattgaaacccggagcaagaacttcagtgcctgcctggagcttggcgagtccctgctgcagcggcagcaccaggcctcagaggagatccgcgagaaactgcagcaggtgatgtccaggaggaaagagatgaatgagaagtgggaagcccgctgggagcggctccgcatgttgctggaggtgtgccagttctcgagggatgcctctgtggctgaggcgtggctgattgcccaggagccctacctggccagcggggactttggacacacagtggacagtgtggagaagctcatcaagaggcatgaggcttttgagaagtccacggccagctgggcagagcgctttgctgccctggagaagcccaccacgcttgagctgaaagaacgccagattgcagagagacccgcagaggagactgggcctcaagaggaggaaggtgagacagcaggggaggctccggtttcccaccatgcggccaccgagagaacgtccccgggggaagaagagggaacgtggcctcagaacctgcagcagccaccactgccgggtcagcacaaggatgggcagaaatccactggggatgagaggcccgccacagagcccctctttaaggtcctagatacgcctctgagtgagggtgatgagcccgcaacgctgctggccccgcgggaccatgggcagagtgtgcagatggaaggctacctgggccgcaagcatgacttggaggggcccaacaagaaggcttccaacagtaagggagaagagggagaggagaggagggagacagaagaggaggatgaagaggaggaaacagagtctgttgctgtagaaatgcagcaacatgcttcccacgtgtcctggaacaacctgtactgtgtgctcaggaacagtgagctaaccttctacaaggatgccaagaacctggccctggggatgccctaccatggggaggaacccctggccctgagacatgccatctgtgagattgctgccaactacaagaagaagaagcacgtctttaagctgaggctgagtaatggcagcgagtggctcttccatggcaaggatgaggaggagatgctgtcctggctgcagggcgtgagcaccgccatcaacgagtcccagagcatccgcatcaaggcgcagagcctgcccctgccttccctctccggccccgacgccagcctcggcaagaaggagaagagattcagcttcttccccaaaaagaagtag

SEQ ID NO: 103 - DNA, 6981 bp, Pan troglodytes
atgacatcggccacagagtttgaaaatgtgggcaaccagccaccttacagcaggatcaatgcccgctgggacgccccagacgacgagctggataatgacaacagctcagccaggctctttgagaggtcccggataaaggccttggcagatgagcgggaagttgttcagaaaaagaccttcacgaaatgggtgaactcgcacctggctcgagtgtcctgccgcatcaccgatctctacaaggacctgcgggatgggcgcatgctcatcaagctgctggaggtgctctctggagagatgctgccaaagcccaccaaggggaagatgcgcatccactgcctggagaacgtggacaaggctctccagttcctcaaggagcagcgtgtacacctggagaacatgggctcccacgacattgtagacggcaaccaccgcctggtcctgggcctcatctggaccatcatcctccgcttccagattcaggacattgtggtcgaaactcaggaaggtcgtgaaacacgctcagccaaggatgcgttgctgttgtggtgtcagatgaagacggcaggctaccctcatgtcaatatcaccaactttacctccagctggaaggatggcttggcctttaatgccctgatacacaagcaccggcccgacctgatcgactttgataagctgaaggactccaatgcccggcacaacctggagcacgcattcgatgtggctgagcgccagctgggcatcatcccgctcctcgaccccgaagatgtctttacggaaaaccctgatgagaaatccatcatcacctatgtggtggccttttaccactacttctccaagatgaaggtgctggcagtggagggcaagcgtgtcggcaaggttattgaccatgccattgagactgagaagatgattgaaaagtacagcgggctagcctcggacctgctcacctggatcgagcagaccatcactgtcctgaacagccgcaagtttgccaactcgctgacgggcgtccagcagcagctgcaggccttcagcacctaccgcaccgtggagaagccgcccaagtttcaagagaaggggaatctggaagttctactttttaccatccagtcccggatgagagccaacaatcagaaagtgtacacaccccacgatgggaaactagtgtctgacatcaacagggcctgggaaagcctggaggaagctgagtatcggcgggagctggccctgagaaatgagctcattcggcaggagaagctagagcaactggcccggcgctttgaccggaaggccgcaatgagagagacctggctcaatgaaaaccagcgcctcgtggcccaggataactttgggtatgacctggcagctgtggaggccgccaagaagaagcatgaggccatcgagaccgacacagctgcctacgaggagcgggtgagagccctggaggacctggctcaggagctggagaaagagaactaccatgaccagaagcgcatcacggcccgcaaggacaatatactgcgcctatggagctacctgcaggagctgctgcagtcccggcgccagaggctcgagaccaccctggcactgcagaagctcttccaggacatgctgcacagcatcaactggatggatgagatcaaggctcacctcttgtctgccgagtttgggaagcacttgttggaggttgaagacctgctacagaagcacaagttgatggaagctgacatcgccatccaaggggacaaagtgaaggccatcaccgcagccaccctgaagttcaccgaggggaaagggtaccagccttgtgacccccaggtcatccaggaccgcatcagccacttggagcagtgctttgaggagctgagcaacatggcagctgggcggaaggcccaactggagcagtccaaacgactctggaagttcttctgggagatggatgaggctgagagctggatcaaggagaaggagcagatctattcttccctggactatggcaaagacctgaccagtgtgctcatcttacagcgcaagcacaaggcctttgaggatgagctccgtgggctggatgctcacctggagcagatcttccaggaggctcatgacatggttgcacgcaagcagtttgggcacccgcatatcgaggcccgcatcaaggaggtgtcggcacagtgggaccagctgaaggacctggctgccttctgcaagaagaacctccaggatgctgagaactttttccagttccagggcgatgcagatgacctgaaggcttggctgcaagacgcccaccggctgctctctggtgaagatgtggggcaggacgaaggggccacacgggccctggggaaaaagcacaaggacttcctggaggagctggaggagagccgtggggtgatggagcacctggagcagcaggcccagggattccccgaagagtttcgggattccccagatgtgacccatcggctgcaggccctgcgggagctctaccaacaggtggtggcccaggcggacctgcgtcaacagaggctgcaggaagccctggacctgtacacggtgttcggggagacagacgcctgtgagctgtggatgggagagaaggagaagtggctggccgagatggaaatgccagacaccctggaggacctggaggtcgtgcagcacaggttcgacatcctggaccaggagatgaagaccttgatgactcagattgatggtgtgaacctcgctgccaacagcttggtagagagtggccacccacgcagcagggaggtgaagcagtaccaggaccatctgaacaccaggtggcaggcatttcagaccctggtgtcagagcggcgggaggctgtggactcagccctccgagtgcacaactactgcgtggattgcgaggagaccagcaagtggatcacggacaagacaaaggtagtggagtccacaaaagacctggggcgggacctggcaggtatcatcgccatccagcggaagttgtcagggctggagcgtgacgtggccgccatccaggcccgtgtggatgccctggagcgtgagtcccagcagctgatggactcgcaccctgagcagaaggaggacattggtcagcggcaaaaacacttggaggagctgtggcagggcctgcagcaatccctgcagggccaggaggacttgctgggggaagtcagccagctgcaggccttcctgcaggatctggatgacttccaggcctggctctccatcacccagaaggctgtggcctctgaggacatgcccgaatccctccctgaggctgagcagctcctgcagcagcatgcaggtatcaaggatgagattgacgggcaccaagacagctaccagcgtgttaaggagtctggggagaaagtgatccaaggccagacggacccagagtatctgcttctgggccagcggctggagggcctggatactggctgggatgccctgggcaggatgtgggagagccgcagccacaccctcgctcagtgccttggcttccaggagttccagaaagatgccaagcaggctgaagccatcctcagcaaccaggaatacactctggctcacttggagcccccagactccctggaagctgcagaggctgggatccggaagtttgaggatttcttggggtctatggagaacaaccgggataaggtcttgagtcctgtggactctggaaacaagctggtagctgagggaaacctatactcagacaagatcaaggagaaggtgcagctgattgaggacaggcacaggaagaacaacgagaaggcccaggaggcctctgtcctactgagagacaacctggagctacagaacttcctccagaactgccaggagctcactctttggatcaacgacaagctgctgacatctcaggatgtctcctatgatgaagcacgaaaccttcacaataaatggctaaagcaccaggcgtttgtggcagagctggcttcccatgaagggtggctagagaacatcgatgcggaaggaaagcagctgatggatgagaagccccagtttacagccctggtgtcccaaaagctggaagccctgcaccggctctgggacgagctgcaggccaccacaaaggagaagacccagcacctctcggctgccaggagctccgacctgcgcttgcagacccatgctgacctcaacaagtggatcagcgccatggaggaccagctgcggtcagacgacccgggcaaggacctgaccagtgtcaatcggatgttggctaagctgaagcgagtggaggaccaagtgaatgtgcggaaagaggagctgggggagctgtttgcccaggtgccttcaatgggagaggagggaggagatgcagacttgagcatcgagaagcggttcctggacctcctggaacccctaggaaggaggaagaagcagctggaatcatccagagccaagctgcagatcagccgggacttagaggatgagacgctctgggtggaggagaggctgcctctggcccagtcagccgactatggcactaatctgcaaactgtgcaactgttcatgaagaagaaccagacactgcagaatgagattctgggccatacgccgcgggttgaggatgtgctgcagagagggcagcagctggtggaggcggcggagatcgactgccaggaccttgaggagcgcctggggcacctgcagagctcctgggacaggctgcgggaggcagcggccgggaggctgcagcgactgagggacgccaacgaggcacagcagtactacctggatgcggacgaggctgaggcctggattggcgagcaggagctctacgtcatctccgatgagatccccaaggatgaagagggcgccatcgtgatgctgaagcgacatttgcggcagcagcgtgcggtggaggactacggccggaacatcaagcagctggccagccgggcccagggcctgctgtctgcaggccaccctgagggggaacagatcatcagacttcaggggcaagtggacaagcactacgcagggctgaaggacgtggcggaagagcgcaagcgcaagctggagaacatgtaccacctgttccagctcaagcgggagaccgacgacctggagcagtggatttcagaaaaggagctggtggcctcttccccagaaatggggcaagactttgaccacgtgactcttctgcgggacaagttccgggactttgcccgggagaccggggcgattgggcaggagcgggtggacaatgtgaatgccttcatcgagcgactcatcgacgcgggccacagcgaggcggccaccattgccgagtggaaggacgggctgaacgagatgtgggcagacctcctggagctcattgacacgcgcatgcagctgctggccgcctcctatgacctgcaccgctacttctacacgggtgccgagatcctgggcctcatcgacgagaagcaccgcgagctgcccgaggacgtggggctggacgccagcacggccgagtccttccaccgggtgcacacagccttcgagcgggagctccacctgctgggtgtccaggtgcagcagttccaggacgtggccacccgtctgcagacagcatatgctggggagaaggcagaggccatccagaacaaggagcaggaggtgtctgccgcgtggcaggcgctgctcgatgcctgtgccgggcgccggacccagctagtggacacggcggataaattccgcttcttcagcatggcccgtgacctcctctcctggatggagagcatcatccggcagatcgagacccaggagaggcccagggatgtctcctctgtggaactgctcatgaagtatcaccagggcatcaatgcagagattgaaacccggagcaagaacttcagtgcctgcctggagcttggcgagtccctgctgcagcggcagcaccaggcctcagaggagatccgcgagaaactgcagcaggtgatgtccaggaggaaagagatgaatgagaagtgggaagcccgctgggagcggctccgcatgttgctggaggtgtgccagttctcgagggatgcctctgtggctgaggcgtggctgattgcccaggagccctacctggccagcggggactttggacacacagtggacagtgtggagaagctcatcaagaggcatgaggcttttgagaagtccacggccagctgggcagagcgctttgctgccctggagaagcccaccacgcttgagctgaaagaacgccagattgcagagagacccgcagaggagactgggcctcaagaggaggaaggtgagacagcaggggaggctccggtttcccaccatgcggccaccgagagaacgtccccgggggaagaagagggaacgtggcctcagaacctgcagcagccaccactgccgggtcagcacaaggatgggcagaaatccactggggatgagaggcccgccacagagcccctctttaaggtcctagatacgcctctgagtgagggtgatgagcccgcaacgctgctggccccgcgggaccatgggcagagtgtgcagatggaaggctacctgggccgcaagcatgacttggaggggcccaacaagaaggcttccaacaggtcctggaacaacctgtactgtgtgctcaggaacagtgagctaaccttctacaaggatgccaagaacctggccctggggatgccctaccatggggaggaacccctggccctgagacatgccatctgtgagattgctgccaactacaagaagaagaagcacgtctttaagctgaggctgagtaatggcagcgagtggctcttccatggcaaggatgaggaggagatgctgtcctggctgcagggcgtgagcaccgccatcaacgagtcccagagcatccgcatcaaggcgcagagcctgcccctgccttccctctccggccccgacgccagcctcggcaagaaggagaagagattcagcttcttccccaaaaagaagtag

SEQ ID NO: 104 - DNA, 6837 bp, Pan troglodytes
atgacgaccacagtagccacagactatgacaacattgagatccagcagcagtacagtgatgtcaacaaccgctgggatgtcgacgactgggacaatgagaacagctctgcgcggctttttgagcggtcccgcatcaaggctctggcagatgagcgtgaagccgtgcagaagaagaccttcaccaagtgggtcaattcccaccttgcccgtgtgtcctgccggatcacagacctgtacactgaccttcgagatggacggatgctcatcaagctgctggaggtcctctctggagagaggctgcctaaacccaccaagggacgaatgcgcatccactgcttagagaatgtggacaaggcccttcagttcctgaaggagcagagagtccatcttgagaacatggggtcccatgacattgtggatggaaaccaccggctgacccttggcctcatctggaccatcatcctgcgcttccagatccaggatatcagtgtggaaactgaagacaacaaagagaagaaatctgccaaggatgcattgctgttgtggtgccagatgaagacagctgggtaccccaatgtcaacattcacaatttcaccactagctggagggacggcatggccttcaatgcactgatacacaaacaccggcctgacctgatagattttgacaaactaaagaaatctaacgcacactacaacctgcagaatgcatttaatctggcagaacagcacctcggcctcactaaactgttggaccccgaagacatcagcgtggaccatcctgatgagaagtccataatcacttacgtggtgacttattaccactacttctctaagatgaaggccttagctgttgaaggaaaacgaattggaaaggtgcttgacaatgctattgaaacagaaaaaatgattgaaaagtatgaatcacttgcctctgaccttctggaatggattgaacaaaccatcatcattctgaacaatcgcaaatttgccaattcgctggtcggggttcaacagcagcttcaggcattcaacacttaccgcactgtggagaaaccacccaaatttactgagaaggggaacttggaagtgctgctcttcaccattcagagcaagatgagggccaacaaccagaaggtctacatgccccgggaggggaagctcatctctgacatcaacaaggcctgggaaagactggaaaaagcggaacacgaaagagaactggctttgcggaatgagctcataagacaggagaaactggaacagctcgcccgcagatttgatcgcaaggcagctatgagggagacttggctgagcgaaaaccagcgtctggtgtctcaggacaactttgggtttgaccttcctgcagttgaggccgccacaaaaaagcacgaggccattgagacagacattgccgcatacgaggagcgtgtgcaggccgtggtagccgtggccagggagctcgaggccgagaattaccacgacatcaagcgcatcacagcgaggaaggacaatgtcatccggctctgggaatacctactggaactgctcagggcccggagacagcggctcgagatgaacctggggctgcagaagatattccaggaaatgctctacattatggactggatggatgaaatgaaggtgctagtattgtctcaagactatggcaaacacttacttggtgtggaagacctgttacagaagcacaccctggttgaagcagacattggcatccaggcagagcgggtgagaggtgtcaatgcctccgcccagaagttcgcaacagacggggaaggttacaagccctgtgacccccaggtgatccgagaccgcgtggcccacatggagttctgttatcaagagctttgccagctggcggctgagcgcagggcccgtctggaagagtcccgccgcctctggaagttcttctgggagatggcagaagaggaaggctggatacgggagaaggagaagatcctgtcctcggacgattacgggaaagacctgaccagcgtcatgcgcctgctcagcaagcaccgggcgttcgaggacgagatgagcggccgcagtggccactttgagcaggccatcaaggaaggcgaagacatgatcgcggaggagcacttcgggtcggagaagatccgtgagaggatcatttacatccgggagcagtgggccaacctagagcagctctcggccattcggaagaagcgcctggaggaggcctccctgctgcaccagttccaggcagatgctgatgacattgatgcctggatgctggacatcctcaagattgtctccagcagcgacgtgggccacgatgagtattccacacagtctctggtcaagaaacacaaggacgtggcggaagagatcgccaattacaggcccacccttgacacgctgcacgaacaagccagcgccctcccccaggagcatgccgagtctccagacgtgaggggcaggctgtcgggcatcgaggagcggtataaggaggtggcagagctgacgcggctgcggaagcaggcactccaggacactctggccctgtacaagatgttcagcgaggctgatgcctgtgagctctggatcgacgagaaggagcagtggctcaacaacatgcagatcccagagaagctggaggatctggaggtcatccagcacagatttgagagcctagaaccagaaatgaacaaccaggcttcccgggttgcagtggtgaaccagattgcacgccagctgatgcacagcggccacccaagtgagaaggaaatcaaagcccagcaggacaaactcaacacaaggtggagccagttcagagaactggttgacaggaagaaggatgccctcctgtctgccctgagcatccagaactaccacctcgagtgcaacgaaaccaaatcctggattcgggaaaagaccaaggtcatcgagtccacccaggacctgggcaatgacctggctggcgtcatggccctgcagcgcaagctgaccggcatggagcgggacttggtggccattgaggcaaagctgagtgacctgcagaaggaggcggagaagctggagtccgagcaccccgaccaggcccaggccatcctgtctcggctggccgagatcagcgacgtgtgggaggagatgaagaccaccctgaaaaaccgagaggcctccctgggagaggccagcaagctgcagcagttcctacgggacttggacgacttccagtcctggctctctaggacccagacagcgatcgcctcggaggacatgccaaacaccctgaccgaggctgagaagctgctcacgcagcacgagaacatcaagaacgagatcgacaactacgaggaggactaccagaagatgagggacatgggcgagatggtcacccaggggcagaccgatgcccagtacatgtttctgcggcagcggctgcaggccctggacactggatggaacgagctccacaagatgtgggagaacagacaaaatctcctatcccagtcacatgcctaccagcagttcctcagagacacgaagcaagccgaagcctttcttaacaaccaggagtatgttctggctcacactgaaatgcctaccaccttggaaggagctgaagcagcaattaaaaagcaagaggacttcatgaccaccatggacgccaatgaggagaagatcaatgctgtggtggagactggccggaggctggtgagcgatgggaacatcaactcagatcgcatccaggagaaggtggactctattgatgacagacataggaagaatcgtgagacagccagtgaacttttgatgaggttgaaggacaacagggatctacagaaattcctgcaagattgtcaagagctgtctctctggatcaatgagaagatgctcacagcccaggacatgtcttacgatgaagccagaaatctgcacagtaaatggttgaagcatcaagcatttatggcagaacttgcatccaacaaagaatggcttgacaaaatcgagaaggaaggaatgcagctcatttcagaaaagcctgagacggaagctgtggtgaaggagaaactcactggtttacataaaatgtgggaagtccttgaatccactacccagacaaaggcccagcggctctttgatgcaaacaaggccgaacttttcacccagagctgtgcagatctagacaaatggctgcacggcctagagagtcagattcagtctgatgactatggcaaagacctgaccagtgtcaatatcctgctgaaaaagcaacagatgctggagaatcagatggaagtgcggaagaaggagatcgaagagctccaaagccaagcccaggccctgagtcaggaagggaagagcaccgacgaggtggacagcaagcgcctcaccgtgcagaccaagttcatggagttgctggagcccttgaacgagaggaagcataacctgctggcctccaaagagatccatcagttcaacagggatgtggaggacgagatcttgtgggttggagagaggatgcctttggcaacttccacggatcatggccacaacctccagactgtgcagctgttaataaagaaaaatcagaccctccagaaagaaatccaggggcaccagcctcgcattgacgacatctttgagaggagccaaaacatcgtcactgacagcagcagcctcagcgctgaggccatcagacagaggcttgccgacctgaagcagctgtggggtctcctcattgaggagacagagaaacgccacaggcggctggaggaggcgcacagggcccagcagtactactttgacgctgctgaggccgaagcctggatgagcgagcaggagctgtacatgatgtcagaggagaaggccaaggatgagcagagtgctgtctccatgttgaagaagcaccagatcttagaacaagctgtggaggactatgcagagaccgtgcatcagctctccaagaccagccgggccctggtggccgacagccatcctgaaagtgagcgcattagcatgcggcagtccaaagtggataaactgtacgctggtctgaaagaccttgctgaagagagaagaggcaagctggatgagagacacaggttattccagctcaaccgggaggtggacgacctggagcagtggatcgctgagagggaggtggtcgcagggtcccatgaactgggacaggactatgagcatgtcacgatgttacaagaacgattccgggagtttgcccgagacaccgggaacattgggcaggagcgcgtggacacggtcaatcacctggcagatgagcttatcaactctggacattcagatgccgccaccatcgctgaatggaaggatggcctcaatgaagcctgggccgacctcctggagctcattgacacaagaacacagattcttgctgcttcctatgaactgcacaagttttaccacgatgccaaggagatctttgggcgtatacaggacaaacacaagaaactccctgaggagcttgggagagatcagaacacagtggagaccttacagagaatgcacactacatttgagcatgacatccaggctctgggcacacaggtgaggcagctgcaggaggatgcagcccgcctccaggcggcctatgcgggtgacaaggccgacgacatccagaagcgcgagaacgaggtcctggaagcctggaagtccctcctggacgcctgtgagagccgcagggtgcggctggtggacacaggggacaagttccgcttcttcagcatggtgcgcgacctcatgctctggatggaggatgtcatccggcagatcgaggcccaggagaagccaagggatgtatcatctgttgaactcttaatgaataatcatcaaggcatcaaagctgaaattgatgcacgtaatgacagtttcacaacctgcattgaacttgggaaatccctgttggcgagaaaacactatgcatctgaggagatcaaggaaaaattactgcagttgacggaaaagaggaaagaaatgatcgacaagtgggaagaccgatgggaatggttaagactgattctggaggtccatcagttctcaagagacgccagtgtggccgaggcctggctgcttggacaggagccatacctatccagccgagagataggccagagcgtggacgaggtggagaagctcatcaagcgccacgaggcatttgaaaagtctgcagcaacctgggatgagaggttctctgccctggaaaggctgactacattggagttactggaagtgcgcagacagcaagaggaagaggagaggaagaggcggccgccttctcccgagccgagcacgaaggtttcagaggaagccgagtcccagcagcagtgggatacttcaaaaggagaacaagtttcccaaaacggtttgccagctgaacagggatctccacggatggcagaaacggtggacacaagcgaaatggtcaacggcgctacagaacaaaggacgagctctaaagagtccagccccatcccctccccgacctctgatcgtaaagccaagactgccctcccagcccagagtgccgccaccttaccagccagaacccaggagacaccttcggcccagatggaaggcttcctcaatcggaaacacgagtgggaggcccacaataagaaagcctcaagcaggtcctggcacaatgtttattgtgtcataaataaccaagaaatgggtttctacaaagatgcaaagactgctgcttctggaattccctaccacagcgaggtccctgtgagtttgaaagaagctgtctgcgaagtggcccttgattacaaaaagaagaaacacgtattcaagctaaggtga

SEQ ID NO: 105 - DNA, 6900 bp, Pan troglodytes
  misc_feature 4595: n = a, c, g, or t
  misc_feature 4600: n = a, c, g, or t
atgagcagcacgctgtcacccacagactttgacagcttggaaatccagggccagtacagtgacatcaacaaccgctgggaccttcctgactcggactgggacaatgacagcagctcggcccgcctctttgagaggtctcgaattaaggctctggcagatgaacgagaagctgtgcagaagaaaaccttcaccaagtgggtaaactcgcacctggcccgggtcacgtgccgggtgggggacctgtacagcgacctccgggacggacgcaacctgctgaggctcctcgaggtgctctcgggagagatactgccaaagcctacaaagggccgcatgcggatccactgcctggagaacgtggacaaggcactgcagttcctcaaggagcagaaagtgcatttggaaaacatgggctcccatgacattgtggacggaaaccaccgactgacccttgggctggtctggaccatcatccttcgattccagatccaagacatcagtgtggagacagaagacaacaaggagaagaagtcagccaaggatgccctgcttctgtggtgccagatgaagactgcaggttatcccaacgtcaatgtacacaacttcaccaccagctggagagatggactagctttcaacgccatcgtgcataaacaccggccagacctgctggattttgagtctctgaagaagtgtaatgcacactataatcttcagaatgcattcaatctggctgaaaaggaactgggacttaccaagctgctggatcctgaagacgtgaatgtggaccagccagatgagaagtcaatcattacctatgtggctacttactaccattacttctccaagatgaaggccctggccgtggaaggcaagagaattggcaaggtgctggaccatgccatggaggcagagcgcctggtggagaaatacgagtccctggcctcggagctgctgcagtggatcgagcaaacgatcgtgaccctcaatgaccggcagttggccaactccctgagcggggtccagaaccagctgcagtccttcaactcctaccgcaccgtggagaagccgcccaagtttaccgagaaaggaaacttggaagtgctgctcttcaccatccagagcaagcttcgggccaacaaccagaaggtctacacgcctcgcgagggccggctcatctcggacatcaacaaggcttgggagcggctggagaaggcggagcacgagcgtgagctggccctgcgcaccgagctcatccgccaggagaagctggagcagctggccgcccgcttcgaccgcaaggccgccatgcgggagacctggctcagcgagaaccagcgcctcgtgtcccaggacaactttgggctggagctggcagctgtcgaggcagcagtacggaagcacgaagccattgagacggacatcgtggcctacagcggccgggtgcaggcggtagacgccgtggctgcagagctggccgccgagcgctaccacgacatcaagcgcattgccgctcggcagcacaacgtggcacggctctgggacttcttgcggcagatggtggccgcccggcgggagcggctcctcctcaacctggagctgcagaaggtgttccaggacctgctctacctcatggactggatggaagagatgaagggccggctgcagtctcaggacctgggcaggcacctagcaggagtggaggacctgctgcagctgcacgagctggtggaggcagacatcgccgtgcaggccgagagggtgcgggccgtcagcgcctctgccctgcgcttctgcaacccagggaaagagtatagaccttgcgacccgcagctggtgtcggagcgggtggccaagctagagcagagctatgaggcgctgtgcgagttggcagcggcgcggcgggcccggctggaggaatcacggcggctctggcgtttcctctgggaggtgggcgaagctgaggcctgggtgcgggagcagcagcacctcctggcctcagctgacacgggccgagacctgaccggtgccctccgcctgctcaacaagcacacagccctgcggggcgagatgagcggccggctggggcccctgaagctcaccctggagcagggccagcagttggtggccgagggtcaccctggggcaagccaggcctctgcccgtgcagctgagctccaagcccagtgggagcggctagaggccctggccgaggagcgtgcccagcggctggcccaagccgccagcctctaccagttccaggccgatgcaaacgacatggaggcctggttggttgacgcactgcgcctggtgtccagccccgagctggggcacgacgagttctccacgcaggctctagctaggcagcatcgggccctggaggaggagatccgaagccaccggccaaccctggacgccttgagggaacaggcagcagccctgccccccgcactgagccgcacgcccgaggtgcagggccgggtgcccaccctggagcggcactacgaggagctgcaggcccgggcaggcgagcgagcgcgggccttggaggcagccctggcgctctacaccatgctcagtgaggccggggcctgtggactctgggtggaggagaaggagcagtggctcaacgggctggccctgcctgaacgcctggaggacctggaggtcgtgcagcagaggttcgagaccctggagcctgaaatgaacacccttgcagcacaaatcaccgcggtgaatgacattgccgagcagttactgaaggccaaccccccaggcaaggaccgcattgtcaacacccaggagcagctcaaccacaggtggcagcagtttcggcgtctggcagacggcaagaaggcagctctcacctcagccctgagcatccagaactaccacttagagtgcacggagacccaggcctggatgagagagaagaccaaagtcatcgagtccacccagggcctaggcaacgatctggctggggtgctggccctgcagcgcaagctggccggcacggagcgggacctggaggccatcgccgcccgggtgggcgaactgactcgagaggcaaatgccctggctgccggccatcccgctcaggcagcggccatcaacgcccggctgagagaggtgcagaccggctgggaggacctcagggccaccatgcggcgtcgagaagagtcgctgggggaggcgcggcggctgcaggacttcctgcgcagcttggatgacttccaggcctggctaggccgcactcagactgctgtggcctctgaagaagggccggccaccctgcctgaggcagaggccctcctggcccaacatgcagccctgcggggagaggtggagcgggcccagagcgagtatagccggctgcgagccctgggcgaggaggtgacccgggaccaggctgacccccagtgcctcttcctacgacagcgactggaggccctgggaactggctgggaggagctgggccgaatgtgggagagccggcaaggtcgcctggcccaggcccacggcttccagggattcctgcgggatgctcgtcaggctgagggcgtgctcagcagccaggaatatgttctgtctcacacggagatgccagggacactccaggctgctgatgctgccattaaaaaactggaggacttcatgaacaccatggacgccaatggggaacggatccgcgggctcctggaggctggccgccagctggtatctgaaggcaacatccacgccgacaagattcgggaaaaggcagactccatcgagaggaggcacaagaagaatcaagacgcagcgcagcaatttctgggccgtcttcgggacaaccgggagcagcagcatttcctgcaagattgtcacgagctgaagctctggatcgacgagaagatgctgacagcccaggacgtgtcctatgacgaggcccgcaacctgcataccaagtggcagaagcaccaggcattcatggccgagctggctgccaacaaagactggctggacaaggtggacaaggaagggcgagagctcacccttgagaagccagagctgaaagccctggtgttggagaagctgagagacctgcacaggcgctgggacgagctggagaccaccacccaagccaaggcccgcagcctctttgatgccaaccgagctgagctgtttgcccagagctgctgtgccctggagagctggctggagagcctgcaggcccagctgcactcggatgactacggcaaggacctcaccagcgtcaacatcctgctcaagaagcagcagatgctggaatgggagatggctgtgagagagaaggaggtggaggcaatccaggcccaggccaaagcactggcccaggaggaccagggtgcaggggaggtggagagaacctcgagggccgtggaggagaagttcagggccttgtgccagcccatgcgggaacgctgccggcgcctgcaggcttctcgcgagcagcaccagttccaccgcgacgtggaagatgagattttgtgggtgacagagcggctgcccatggccagctccatggagcatggcaaggacctgcccagtgtccagcttctcatgaagaaaaaccagancctgnagaaagagattcagggccatccttttcggatcgcggacctgagggagcggcagcgtgctctaggtacagcagcagcaggtccagagctggctgatctgcaggaaatgtggaaacgcctgggccacgagctggaacttcgagggaagcgactggaggaggccctgcgagcccagcagttctaccgcgatgccgccgaggcggaggcctggatgggcgagcaggaattacacatgatgggccaggagaaggccaaggatgagctgagtgcccaggcagaggtgaagaagcaccaggtgctggagcaagccctggccgactacgcgcagaccatccaccagctggcggccagcagccaggacatgattgaccacgagcacccagagagcactcggatatccatccgccaagcccaggtggacaagctgtatgccggcctgaaggagctggctggagagcggcgggagcgcctgcaggagcacctccggctgtgccagctccgccgcgagctggatgacctagagcagtggatccaggagcgcgaggtggtggcggcctcccacgagctgggccaggacttcgagcatgtgactatgctccgagacaaattccgagagttctcccgggacacaagcaccatcggtcaggagcgcgtagatagcgccaatgcgctggccaatgggctcattgctgggggccatgctgcacgggccaccgtggccgagtggaaggacagtctcaacgaggcctgggctgacctgcttgagctgctggacacacggggtcaggtgctggccgcggcgtacgagctgcagcgcttcctgcacggggcacgccaagccctggcgcgggtgcagcacaagcagcagcagcttccagacgggactggccgcgacctcaacgctgccgaggccctgcagcgccgacactgtgcctacgagcatgacattcaggccctcagcccccaggtccagcaggtgcaggacgacggccaccggctccagaaggcctacgctggagacaaggctgaggagatcggccgccacatgcaggccgtggccgaggcctgggcccagcttcagggaagctctgccgcccgccggcagctgctgctggacaccacagacaagttccgcttcttcaaggctgtccgggaactgatgctctggatggatgaggtcaacctgcagatggatgcccaggagcgtccccgggatgtgtcctccgcggatctagtcatcaagaaccagcaaggcatcaaggcagagatagaggcccgggcagaccgcttctcctcctgcatcgacatggggaaggagctgctggccaggagccactatgcggctgaggagatctcagagaagctgtctcagctgcaggcacggcgccaggagacagctgagaagtggcaggagaagatggactggcttcagctggttttggaggtgcttgtgtttggaagagatgcagggatggcagaggcctggctctgcagccaggagccgctggtgcgcagcgctgagctgggttgcacggtcgacgaagttgagagcctcatcaagcggcacgaggccttccagaagtcagcagtggcctgggaggagcgattctgtgcgctggagaagcttactgcgctagaggagcgggagaaggagcgaaagagaaagagggaggaggaggagcggaggaaacagccgcctgctcccgaacccacagccagtgtgcctccaggggacctggtgggcggccagacagcttctgacaccacctgggacggaacccagccacggccaccaccatccacacaagcacccagtgttaatggagtctgcacagatggagagccctcacagcccctgctgggacaacagagacttgagcccagcagcttccccgaagggccgggacctggctcaggggacgaagccaatgggccccggggagagaggcagactcggactcggggcccggccccatctgcaatgccccagagcaggtccaccgagtcagcccatgctgccaccctgccgcctcgaggcccagagccatctgcccaggagcagatggaggggatgctgtgccgcaagcaggagatggaggccttcgggaagaaggctgccaacaggtcctggcagaacgtgtactgtgtcctgcggcgtgggagcctcggcttttacaaggatgccaaggcagccagtgcgggagtgccataccacggagaagtgcctgtcagcctggccagggcccagggcagcgtcgcctttgattaccgaaagcgcaaacatgtcttcaagctggggtag

SEQ ID NO: 106 - DNA, 7260 bp, Equus caballus
atggcgagtggtgggccaaaggtgctggaaacagcagaggagatccaggagaggcgtcgcgaggtgttaaatcggtaccagaggttcaaggagctggttgctgagaggggtcagaagcttgaagagtcttatcactaccaggttttcagacgagatgcagatgacctggagaaatggatcatggagaaacttaagattgcagaggataagagctatgaagacccaactaacatacaggggaaatatcagaagtatgaatcctttgaagcagaggtacaagcaaaatcaagggtcattcctgaactggaagaaatctggagagttcgatttactgagggacattttgcccatgaggacacgaagaaacatctggatgaactgtgccgtctgtgggacctgttgttagagctgactcaggagaagggtatcctgctgctgcgggccctgaagttccaccagtacttccaagagtgtgctgacatcttggagtggattgcagacaaggaagctattgtgacatccgtggagctgggtgaggattgggagcacacagagattctgcataggaagtttgaagagttccaaggggacctaacagctcgaaagaggagagtggatgcagtgaaccaatatgccaatgagtgtgctgaggagaaccatcctaagctgactttgattaagcaaaagcaggatgaggtgaatactgcctgggaacgtctctacagtctggctctcaagcgacagaaaacactgtccgatgctacagacttccagcgattcaaaagggatgtgactgaagccatcctgtggaccaaggagaaagagcctcagcttacctctgaagactatggcaaagatcttgttagctcagaggcactgtttcacagccacaagacacttaagaggaacctcgcagtcatggatgacaaggtgaaagagttatatgccaaagcagagaagcttaagctttctcatccttcggatgcacctcagatcaagcaaatgaaagaggatctggcctcctcctggaagaacattcaggccttggataccaacagatttgcaaaactgcaggcttcttacgggtaccagcggttcttatctgactatgatgagctctcaggctggatgaaggagaagaccactctcatcaatgctgatgagctgcccacagatgtggctggtggggaagccctgctagacaggcatcagcagcacaagcatgagattgactcttacgatgaccgatttcaatccgctgatgagactggtcaagccctgttggatgtaaatcatgaagcctctgtggaagttcaggaaaagatgacagaacttgccaatcagtgggccgcgctgttggaactgtgggacaagcgtcagcatcagtatgagcagtgcttggacttgcacctcttctaccgtgacagtgagcaagtggacagttggatgagtagacaagaggctttcctggaaaacgaggacctgggaaactccttgggcagtgtagaagcccttcttcagaagcatgatgacttcgaggaagcctttactgcccaggaggagaagatcacaaccttagacaagactgcaaccaaactgattgataataagcattatgattcagagaacatcgcttctatccgtgacctgctgttggttcggcgggatgtcctacgtgaaagagctgctgttcgacgcagattgctgaaggagtctttgcttctgcagcagatgtatcaggactcagatgacctaaagaactggatcaacaagaagaaaaagttggcagatgatgaagaatacaaagatatacagaacttgaagagccaggtacaaaagcaacaagcctttgaagaagaactggcagctaatgagattctgctcaataacctaaaaatgactgtccagaaaatgattgaggatgatcactatgcctctgacactgcagccgctcgtgtgagtgaagttgccagcctctgggagaaattgctgcaggctacagcacagagagggactgagttggagaaagccaacaagctgctgcaatttgaaaataatgcagaagatctgaagcactggctgatggaggttaagtggcaggctacctctgaggactatgggaaaggcctggcagatgtacagaatctactcaggaaacatgggcttctggagtctgctgtggctgttcgtcaggatcaagtgaacacccttaaagacctggcaacatattttgaagaaataggccatcccgatgctgtggacatacaggaaatgcgggagtccctggtgtcccagtttgaaggcctgaaagagccactggccacccggaagaagaaactcattgaccttctcctcctgcatcagatctacagagacacagaggacgaggaggcctggatccaagagactgaaccctcagcagcttccacctaccttggcaaggatttgattgcctccaagaatcttctgaacagacaccaagtcatccaggctgacattgccagccatgagccacgcattcagttgataatggagagaggaaacaaaatggtagaggaaggacactttgctgcagaagatgtggcctcaaaggttaagagtttgaatgagaatatggagtctctccaggctcgagctgctagacggcagaatgatcttgaggccattgtccagttccagcagtacctggctgacctgcatgaagcagaagcatggattagagagaaggaacctattgtagacaacactaactatggagctgatgaagaagcagctgaggctcttctaaagaagcatgaggcctttctagtggatctcaaagcatttggaaacagtatgaaagctctacgggatcaggcagaagccttccagcaacaacaggctgcaccagtggaaggagctgctcgagaagtgagggttatggctttatatgacttccaggcccgcagcaaccgagaagtcaccatgaagaaaggtgatgtcttaactctgctcagttccatcaacaaggactggtggaaggtggaagctgatgatcaccagggctttgtgccagctgtctatgtcaggaagctggcccatgatgagtttcctatgctccctcagcggcagcgagaagaaccaggcagcatcacccagcgccaggaacagattgagaaacagtatcgctccctccttgatcgggcagaagaacgcagacgtcgtctattgcaacgatacaatgagtttttgctggcctatgaggcaggagacatgctggactggatccgagagaaaaaggcagaaaacactggggtagacctagatgatgtttgggagctgcagaaaaagtttgatgagttccaaacggatttgaagaccaatgagccccggctgaaggatatcaacaacatagctgatgatcttctatttgaaggccttctaacaccagaaggaactcaaatacggaaggagttgaatacccgctgggactccttgcagcggcttgcagatgaacagcgccagatgctgggcagtgcccatgctgtccagatgtttcacagagacgcagatgaaacgaaggagcagattgaaaagaagtgcaagaccctcagtgccgctgatcctggctcagacctgttcagtgttcaggctcttctgcgacagcatgagggctttgagagagatctcgcacccctgggggaaaaggtgactgtattgggggcaacagcagagtggctctgtgaggcccacccagatgccattgatgacctgaataagaagcgaatggagctgaatgaggcctgggacaacctgctggggtgtacaaaggatcgtaaggagaatctaaatgaggcccaaaaattctacctgttcctcagcaaggccagggacctacagaattggatcagtggcattcatggcatggtatcatcacaggagctggctgaagatttaattggcacagagatcttgatagagcgacatcaggatcatcatgctgacatgaatgccaaggctcccaccttccaggacttagaagattttgctacagaacttataatcagtggtcaccatgccagtcctgaaattgaagaaaagcttaaagctgtcaggatagagagggatgatttggagaaagcttgggaacaacgcaagaagatgctagatcagtgtctggaattgcagttgttccaagggaactgtgatcaggctgagagctggatggtggcacgtgagaatgtcctgaggtcagatgataaaggtttcttagacagtctagaggccttgatgaagaaacgtgatgatttggacacagcaatcactacccaggaaaagaagatcacagaactagaacattttgctgaacggctcatagctgatgaccactatgccaaggaagagattgctgctcagctccaacatgtgctagacaggtggaaggcactgaaagcacagctgactgctgagcggatgaaactcggcgactatgctgacctgaaacaattctaccgtgaccttgaagacctggaagaatggatcagcagtatgctgcccatagcctgtgatgaatcctacaaagaccccaccaacattcagaggaaatacctgaagcaccaaacctttgaaaatgatgtctatggccaagctgagcatgtgaaccgagtcatcaacatggggaattccctgattgagcggcgggcatgtgatggcaaggaagagatcgtgaagggtcaattggaagagctgcagaaacactgggatgacctgtatacaagaacaattgacaaaggagagaagctcaacgaggctagtcgccaacaaaggttcaacacaggcatccgagactttgagttctggctctcagaggcagagacactgctggccatgaaagatcaggcaagggacttggcatctgcaggaaacctgctcaagaagcatcagctattggaaacagagatgttgacccgagaggatgcactcaaggacctgaatcagctggctacggatctgctctccagtgggacattcaacgttgagcagattgtggagaaaagggataatgtcaacgaccgcttcctgaatgtccagaacttagcagctgcacaccatgagaaactgaaagaggactatgccttgttccagttcttccaagacctggataatgaggaatcctggatacaggacaggttgagtcgagtgagctctgaggacgatgtgaaggatctgccgggggttcagaacctaatgaagaagcacaaacgcctagaaggggaactggtggcacatgaacctgccatccagaatgtgctggatatggcagagaagctaggtgacaaggctgctgtgggacaagaagagatccagaagcgacttgctcagtttgttgaacactgggagaagctcaaagagttggccaaggctcgagggcttcaactggcagagtctctagaatacttgcagttcaaggagaatgctaaggaagaggaagcttggatccgtgaaaaggaagctatcgttgcccaaggggagtctggagacacattggctgctactcagagcttgctaaagaagcatgaagcattggataatgactttgctgtccatgagaccagagtgcaaagtgtgtgtgctcaaggagaagacatcctgggcaaggttttgcaggagggaagtcatcacaaggagaagatttctgccaagatatatgctctgaatgaaaaggccccttctctggccaaggcaatagctgccaggaagtcacagttagaagatgaatatgcctttcagcaatttaattggaaggttgacgtggtagaagcctggatagctgagaaggaagcaagcctgaagatcagtggaaatggtgcagacctcgctggctttctcgctctcctggcaaaacaggacacactggatgccagtctggagagcttccagaaagagagactgccaaagataactgacctaaaggaccgactggtggcagctcagcatagccagactgaagccattgaggagcgccatgctgccctgctgaggcgctgggaacagctgctggaagcctgtaaagcccacagacataaattgctagagaaacagctgcccctggaggaggctgagaagttattcatgaaatttgcagaaaaggcttcagctttcaacaactggtgtgaaaatgctgaggagaacctgtcagagcctgtgcactgtgtctccctgaatgagattcggcagctgcagaaagaccatgaggtcttcttggcctccttggcaaaggcccaagcagatttcaacgatttgcaggagctagaccagcagatgaaggccttaaatgtgccttccagcccttatacctggttaacaatggaggtgctagaaaagatctggaagcacctatctgacatcatcaaggaacgggagcaggagctacaaaaggaagaggcaagacaggtcaagaattttgagatgtgccaggagtttgaacaaaatgccagtgccttccttcaatgggtctcggagaacagagcttattttctggatggatctttgctcaaagaaacaggaactctggaatccaagttggaagcaaataaaaggaagcagaaggagatccaggcgatgaagcgtcatctgatgaagactggggacctgggggacagcttagaagaggctgtggtcctggacatcaaatacagcaccattgggctggcccagcagtgggaccagctctcccagcttgggatggaaatgcaacataacctggagcaacagatccaagccaaagacaccttaggtgtgagtgaggagacactaaaggagtttagcacaatatatcaacactttgatgagaatttaacaggacgcttgagtcacaaagatttccggtcctgcctgagagcactcaactactacttgcccatggtggaggaggatgaaactgagcccaagtttgagaaattcctagatgctgttgatccaggaaggaagggctatgtctcaaaaaaggactatacctcattcctggttgacaaggagtcagagaacatcaagtccagcaatgaaatagagaatgctttcgaagccctggcagagggcaaggcctatattaccaaagaggacatgaaacaggccctaaccccggaacaagtgtcattctgtgcctcacatatgcagcaatatgtggacccacggggccgaagccacctttctggctatgactatgttggcttcaccaattcctactttgccaatggagaagcagcttcttctgaatcatag

SEQ ID NO: 107 - DNA, 6996 bp, Equus caballus
atgacatcggccacggaggttgaaaatttgggcaaccagccaccatacagccggatcaatgcccgctgggatgccccggacgatgagctggataatgacaacagctcagccaggctctttgagaggtcccggatcaaggccttggcagatgagcgggaagttgttcagaagaagaccttcacgaaatgggtgaacttgcacctggctcgtgtgccctgccgcatcacggacctctacagggacctgcgggatgggcggatgctcatcaggctgctggaggtgctctctggagagacgctgccaaggcccacaaaggggaagatgcgcatccactgcctggagaatgtggacaaggccctgcagttcctcaaggagcagcgtgtgcacctggagaacatgggctcccacgacatcgtggatggcaaccaccgcctggtcctgggcctcatctggaccatcatcctacgcttccagattcaggacattgttgtccaaactcaagaaggtcgtgagacgcgctcagccaaggatgcgttgctgttatggtgtcagatgaagacggcagactatccccaagtcaaggtcactgacttcaccaccagctggaaagatggcctggcctttaatgccctgatccacaaacaccggcccgacctgattgactttgataagctgaaggactccaatgcccgacacaacctagagcatgcgtttgacgtggctgagcatcagctgggcatcatcccgctcctggaccctgaagatgtcttcacagaaaaccctgatgagaaatccattattacctacgtggtagcattttaccactacttctccaaaatgaaggtgctggcggtggagggcaagcgcgtcggcaaggtaattgaccatgccatggacactgagaagatgattgaaaagtacagcgggctggcctcagacctgctcacctggatcgagcagaccatcactgtcctgaacagccgcaagtttgccaactccctggctggcgtccagcagcagctgcaggccttcagcacctatcgtaccacagagaagccgcccaagtttcaggagaaggggaatctggaggtcctactttttaccatccagtcccggatgagagccaacaatcagaaagtgtacacgccacatgatgggaaactagtgtctgacatcaaccgggcctgggaaagcctggaggaagctgaatatcggcgagagctggccctgagaaatgagctcattcggcaggagaagctggagcagctggcccggcgctttgaccgaaaggccgcgatgagagagacgtggctcaatgaaaaccagcgccttgtggctcaggacaactttgggtatgacctggcagctgtggaggccgcgaagaagaagcacgaggccatcgagacggacacagccgcctacgaggagcgagtgagggccctggaggacctggcccaggagctggagaaggagaattaccacgaccagaagcgcatcacggcccgcaaggacaatatcctgcgcctgtggaactacctgcaggagctgctgcagtcccggcgccagagactcgagacgaccctggcgctgcagaagctcttccaggatatgctgcacagcattgactggatggatgacatcaaggctcacctcttgtctgccgagtttgggaaacacttgttggaggtcgaggacttgctacagaagcacaagttgatggaggctgacatcgccatccaaggggacaaagtgaaggccatcatcgcggctacccggcagttcactgaggggaacgggtaccagccttgtgacccccaggtcatccaggaccgtgtcagccacctggagcagtgctttgcagagctgagcaacatggcagcggggcggaaggcccagctggagcagtccaagcggctctggaagttcttctgggaaatggatgaggctgagagctggatcaaggagaaggagcagatttactcctccctggactacggcaaggacctgaccagcgtgctcagcttgcaacgcaagcacaaggcctttgaggatgagctccgtgggctggacgcccacctggggcagatctttcaggaagctgaaggcatggtcactcgcaagcagtttgggtacccacagatcgaggcccgaatcaaggaggtggccacccagtgggaccagctgaaggagctggctgcctttcgtaagaagaacctccaggatgctgagaacttcttccagttccagggcgatgcggatgaactgaaggcctggctgcaggatgcccaccggctgctctcgggcgaagacgtggggcaggatgaaggggccacgcgggccctgaggaaaaagcacaaggacttcctggaggagctggaggagagccatgaggtgatgaagcacctggagcagcaggcccaggagttcccacaagagtttcgggattccccagatgtgaccaatcggctgcaggccctccaggagctctaccagcaggtggtggctcaggcggacctacgtcagcggaggctgcaggacgccctagacctgtatacagtgtttggggagacagatgcctgtcagctgtggatgggtgagaaggagaagtggctggaccagatggatatcccagacacgctggaggacctggaggtcgtgcagcacaggtttgacattctggaccaggagatgaagtcgttgatggctcagattgaaggcgtgaactctgctgccaacagcctggtagagagtggccacccacgcagtggggaagtgaagaagtaccaagacaacctgaacaccaggtggcatgcattccaggccatggtggcagaacggcggggaaaagtagactcagctctccgggtgcacaactactgcgtggattgcgaggagaccagcaagtggatcatggacaaaacgaaggtagtggagtccacaaaggacctcagccgagacctggcaggcgtcattgccatccagcggaagttgtcagggctggagcacgatgtgactgccatcaaggcccgcacgggtgccctggagcgtgagtcgctgcagctgatggagtcacaccctgagcagagagatgacattggccagcggcagaagtatgtggaggagctgtggcagggcctgcagcgagccctggagggccaggaggcctcactgggtgaagccagccagctacaggccttcttgcaggatctggataacttccagtcctggctgtccgtgacccagaaggctgtggcctccgaggacacacccgagtccctcccggaggccgagcagctcctgcagcagcatgcggccatcaaggacgacattgacaggcatcaagagaacttccatcacatcaaggcctctggagagaaggtgatccatggccagacagacccagagtacctgctcctgggccagcggctggaaggcctgtatagtggctgggatgccctgcatcggatgtgggatagccgcggccgctcccttgcccagtgcctcggcttccaggagttccagaaggatgccaagcaggctgaagccatcctcagcaaccaggaatatactctggctcacttggagcccccagactccctagaagctgcagaggcggggatccggaagtttgaggatttcttggcatctatggagaacaaccgggataaggtcttgagtcctgtggactctggaaacattctggtagctgagggaaacctctactcagacaagatcaaggagaaggtgcagcttattgaggacaggcacaagaagaacaatgagaaggcccaggaggcctcagatcttctgagagacaacctggcgctccagaactttctccagaactgccaggagctgactctctggatcaatgacaagctgctgacatctccggatgtctcctatgatgaagcgagaaaccttcataacaaatggctgaagcaccaggcgtttgcggcagagctggcttcccaccaagggtggctggagaacatcgacgcagaagggaaggagctgatggaggagaagccccagtttgcagctctggtgtcccagaagctggaagccttgcaccagctctgggatgagcttcagaccaccacgcaggagaaggcccaacacctcttagctgccaggagctccgacctgcgctcgcagactcacgcagacctcaacaagtggatcagcgccatggaggaccagctgcggtcggatgacccgggcaaggacctgaccagcgtcaaccggatgttggctaagctgaagcgtgtggaggaccaagtgaacgtgcggaaggaggagctgggggagctgtttgcccaggtgccctcacaaggagaggaggtgggggacatggacttgagcatcgagaagcagttcctgaacctcctggagcccctggggaggaggaagaagcagctggaatcatccagagccaagctgcagatcagccgggatatagaggatgagacgctctgggtggaggagaggctgcctctggcccagtcggttgactatggcactaatctgcaaactgtgcagctgttcatgaagaagaaccagacactgcagaacgagatcctgggccatgcgccacgcgtcgaggacgtgctgcagcgggggcagcagctggtggaggcggcggagatcgactgccaggacgttgccgagcgcctgcagcagctgcagggctcctgggagacactgcaggaggcggcggccgggcggctgcggcgcctacgggaggccagcgaggcgcagcagtactacctggacgcgggtgaggccgaagcctggatcagcgagcaggagctctacgtcctatccgaggagagccccgaggatgaagagggtgccatcgtgatgctgaagcggcacctgcggcagcagcgggctgtggaggagtacgggaggaacatcaagcagctggccggccgggcccagagcctactgtccgcaggccaccccgagggggaacagatcatcagacttcaggggcaagtggacaagcagtatgcggggctgaaggacttggcagaggaacgcaagcggaagctggagaacatgtaccacctgttccagctaaagagggaggcagatggcctggagcagtggattacagaaaaggagctcgtggcctcttcctccgaaatggggcaagactttgaccacgttactctgctccgggacaagttccgggactttgcacgggagactggggcgattggccaggagcgggtggacaacatgaatgccttcattgagcgactcatcgacgcgggccacagcgaggcagccaccattgctgagtggaaggacgggctgaacgagatgtgggcggacttgctggagctcatcgacacacgcatgcagctgctggccgcctcctacgacctgcaccgctacttctacacgggcgccgagatcctgggcctcatcgacgagaagcaccgtgagctgcccgaggacgtggggctggacgccagcactgccgagtccttccaccgcgtgcacacggccttcgagcgggagctccacttgctgggcgtgcaggtacagcagttccaggacgtggccacccacctgcagacagcctatgctggggagaaggcagacgccatccagtacaaggagcaggaagtgtctgccgcgtggcaggcactgctcgaggcctgtgccgggcgccgcacccagctggtggacactgcggacaaattccgcttcttcagcatggtccgagacctcttctcctggatggagagcatcatccggcagatcgagacccaggagaggcccagggacgtttcctcagtggaactgctcaagaagtaccatgagggcatcaaggcagagatcgaaacccggagcaagaacttcagcgcctgcctggagctcggagagtccctgttgcagcggcagcaccaggcctcggacgagatcagagagaagaggcagcaggtggtgtccaggagggaggagatgatggagaagtggaaggcccgctgggagcggctctgcctgttgctggaagtgtgccagttctcgagggacgcctctgtggctgaagcgtggctcatcgcccaggagccctacctggccagccgggactttggacacacggtggacagtgtggagaagctcatcaggaggcatgaggcttttgagaagtccacagccagctgggcggagcgctttgcggccctggagaagcccaccacgcttgagctaaaagaacgccagaccccaccgagacctgcggaggagactgggcctcaagaggaggaaggcgagacagcaggggaggctccccgaggtccccatcatgcggccactgagagaacgtccccggggaaagaagagaggcagtggcctcaggacctgcagccgccacccccgccagggcagcaggaggaagggcaggaggagaaatccggtggggatgagaggcccgccactgagcccctctttaaggtcctggacacacctctgagcgagggcgacgaacctacgacgctgccagcccaacgggaccacgggcacagcgtgcagatggagggctacctgggccgcaagcatgacctggaggggcccaacaagaaggcatccaacaggtcctggaacaacctgtactgcgtgctcaggaacagcgaactgaccttctacaaggatgccaagaacctggccctgggggtgccctaccatggggaggagcccctggccctgagacatgccatctgtgagattgctgccaactacaagaagaagaagcacgtcttcaagctgaggctgagcaatggcagcgagtggctcttccatggcaaggatgaggaggagatgctgtcctggctgcagggtgtgagcacagccatcaacgagtcgcagagcatccgcgtcaaggcacagagcctgcccctgccctccctcgccggtcctgacgccagccttggcaagaaggacaaggagaagagattcagcttcttccccaaaaagaagtag

SEQ ID NO: 108 - DNA, 7095 bp, Equus caballus
atgacgaccacagtagccacagactacgacaacattgagatccaacagcagtacagcgatgtcaacaaccgctgggacgtggacgactgggacaatgagaacagctccgcaaggctctttgagcggtcccgcatcaaggctctggcagatgaacgcgaagccgtgcagaagaagaccttcaccaagtgggtcaattcccacctcgcccgagtgtcctgccgcatcacagacctgtacactgaccttcgagatggacggatgctcatcaaactgctggaggtcctctccggagagaggctgcctaaacccaccaagggacgaatgcgcatccactgtctggagaatgtggacaaggcccttcagttcctgaaagagcagagagtccatcttgagaacatggggtcacatgacatcgtggatgggaaccaccggctgacccttgggctcatctggaccatcatcctgcgcttccagatccaagatatcagcgtggaaactgaagacaataaagagaagaaatctgccaaggatgcattgctgttgtggtgccagatgaagacagctgggtaccccaacgtcaacattcacaatttcaccaccagctggagggacggcatggccttcaatgcactgatacacaaacaccggcctgacctgatagattttgacaaactaaagaaatccaatgcacactacaatctgcagaatgcatttaacctggcagagcaacaccttggcctcactaaactgttggaccctgaagatatcagtgtggaccaccctgatgagaagtccattatcacttacgtggtgacttattaccactacttctctaagatgaaggccttggctgttgaagggaaacgaattggaaaggtgcttgacaatgctattgaaacagaaaaaatgattgaaaagtatgaatcacttgcctctgaccttttggagtggattgaacaaaccatcatcattttgaacaatcgcaaatttgccaattcactggttggggttcaacaacagcttcaggcattcaacacttaccgcactgtggagaaaccgcccaaatttactgagaaggggaacttggaagtgctgcttttcactattcagagcaagatgagggccaacaatcagaaggtgtacatgccccgggaggggaagctcatctccgatattaacaaggcctgggaaagactggaaaaagcagagcacgagagagaactggccctgcggaatgagctcataagacaggagaaactggaacagctcgcccgcagattcgatcgcaaggcagctatgagagagacttggctgagcgaaaaccagcgtctggtgtctcaggacaactttggatttgaccttcccgcagtcgaggccgccacgaaaaagcacgaggccattgagacagatattgccgcatacgaggaacgtgtgcaggccgtggtagccgtggccagggagcttgaggcggagaactaccatgacatcaagcgcatcactgcgaggaaagacaatgtcatccggctctgggaatacctactggaactgctcagggcccggaggcagcgtctcgagatgaacctggggctgcagaagatattccaggaaatgctctatattatggactggatggacgaaatgaaggtgctattactgtctcaagactatggcaaacacttacttggcgtggaagacctgttacagaagcacgccctggtggaagcagacattggcatccaggcggagcgggtgagaggggtcaatgcctccgcccagaagtttgcaacagacggggaaggttacaagccctgtgacccccaggtgatccgagaccgcgtggcccacatggagttctgttatcaagagctttgccagctggcggctgagcgccgggcccgtctggaagagtcccgtcgtctctggaagttcttctgggagatggcagaagaggaaggctggatacgggagaaggagaagatcctgtcctccgacgactacgggaaagacctcaccagcgtcatgcgcctgctcagcaagcaccgggctttcgaggatgagatgagtggccgcagcagccactttgagcaggccatcaaagaaggtgaagacatgatcacggaggagcacttcgggtcggagaagatccgagagaggatcatttacatccgggagcagtgggccaacctggagcagctctcggccattcggaagaaacgcctggaggaggcctcgctgctccaccagttccaggcagatgctgatgacattgatgcttggatgctggacatcctcaagatcgtctccagcaatgatgtgggccacgacgagtactccacacagtctctggtcaagaaacacaaggatgtggcagaggagatcgccaactacaggcctaccattgacacgctgcatgagcaagccagcgccctcccccaggagcatgcggagtctccggatgtgaggggcaggctgtcgggcattgaggagcggtacaaggaggtggcagagctgacgcggctgaggaagcaagcgctgcaggataccctggccctgtacaagatgttcagtgaggctgatgcctgtgagctctggatcgatgagaaggagcagtggctcaacaacatgcagatcccagagaagctggaggacctggaggtcatccagcacagatttgagagcctagaaccagaaatgaacaaccaggcgtcccgagtcgcagtggtgaaccagattgcacgacagctgatgcatagcggccacccgagtgagaaggaaatcaaagcccaacaggacaaactcaacacaaggtggagtcagttcagagaactggtcgacaggaagaaggacgctcttctctctgccctgagcatacagaactaccaccttgagtgcaatgagaccaaatcctggattcgggagaagaccaaggttatcgaatccacccaggatctgggcaatgacctggctggcgtcatggccctgcagcgcaagctgactggcatggaacgggacttggtggccattgaggcaaaactgagcgaccttcagaaggaggcggagaagctcgagtccgagcacccggaccaggctcaggccatcctgtctcggctggctgagatcagtgacgtgtgggaggagatgaagaccaccctgaaaaaccgcgaggcctccctgggagaggccagcaagctgcagcagttcctgcgggacctggacgacttccagtcctggctctccaggacccagacggccatcgcctcagaagacatgcccaacaccctgaccgaggcggagaagcttctcacgcagcacgagaacatcaaaaacgagatcgacaactacgaggaggactaccagaagatgagggacatgggcgagatggtcacgcagggacagactgacgcccagtacatgtttctgcggcagcggctgcaggccttggacaccggatggaacgagctccacaaaatgtgggagaacaggcagaatctcctctcccagtcccacgcctaccagcagttcctcagggacacgaagcaggccgaagcctttcttaacaaccaggagtatgttttggcccatactgaaatgcccaccaccttggaaggagctgaagcagctattaaaaaacaagaggacttcatgaccaccatggacgccaacgaggaaaagatcaacgctgttgtggagactggccggcggctcgtgagcgatgggaacatcaactcagatcgcatccaggagaaggtggactctattgatgacagacataggaggaatcgtgaggcagccagtgagctgctgatgagattgaaggacaacagggatcttcagaaattcctgcaagattgtcaggagctctctctctggatcaatgaaaagatgcttacagcccaggacatgtcttatgatgaagccagaaatctgcacagtaaatggttaaaacatcaagcatttatggcagaactcgcgtccaacaaagaatggcttgacaaaattgagaaggaaggaatgcagctcatttcagaaaagcctgagacagaagccgtagtgaaggagaaactcactggtttacataaaatgtgggaagtccttgaatccaccacccagaccaaggcccagcgactctttgacgcaaacaaggcggaactttttacccagagctgcgcagatctggacaaatggctgcatggcctggagagtcagatccagtctgatgactatggcaaagaccttaccagcgtcaacatcctgctgaaaaagcaacagatgctggagaatcagatggaggtgcggaagaaggagatcgaagagctccagagccaggcccaggccctgagtcaggaggggaagagcaccgacgaggtggacagcaagcgcctcactgtgcagaccaagttcatggaattgctggagcccttgaacgaaaggaagcacaacctgctggcctccaaagagatccaccagttcaacagggacgtggaggacgagatcttgtgggttggagagaggatgcctttggcaacttccagagatcatggccacaacctccagactgtgcagctgttaataaagaaaaatcagacccttcagaaagaaatccaggggcaccagcctcgcattgatgacatctttgagaggagccaaaacatcgtcactgacagcagcagcctcagtgcggaggccatccggcagaggctcgctgacctgaaggagcagtggggctgcctcatcgaggagacggagaatcgccacaggcggctcgaggaagcacacagggcccagcagtactactttgacgcggctgaggcggaggcatggatgagcgagcaggagctgtacatgatgtctgaggagaaggccaaggatgagcagagtgccgtctccatgttgaagaagcaccagatcttggaacaagctgtggaggactatgcagagacagtgcatcagctctcgaagaccagccgggccctggtggctgacggccatcctgaaaatgagcgcattagcatgcgacagtccaaagtggataagctgtatgctggcctgaaagaccttgccgaagagaggagaggcaaactggacgagaggcacaggctgttccagctcaaccgtgaggtggatgacctggagcagtggattgccgagagggaggtggtcgcaggatcacatgaattggggcaggactacgagcatgtcacgatgttacaagaacgattccgggaatttgcccgagacacagggaacattgggcaggagcgtgtggatacggtcaatcacatggcagatgaactcatcaactctgggcactcagatgccgccaccatcgccgagtggaaggacgggctcaatgaagcctgggctgacctcctggagctcattgacacaagaacacagattctggctgcctcctatgaactgcataagttttaccatgatgcgaaggagatctttgggcgcatccaggacaaacacaagaaactccccgaggagcttgggagagatcagaacacagtggagaccttacagagaatgcacactacttttgagcatgacatccaggctctgggcacgcaggtgaggcaactgcaggaggatgcggcccgcctccaggcagcctatgcgggtgacaaggctgatgacatccagaagcgagagaatgaggttctggaagcctggaaggccctgctggatgcttgtgagggccgcagggtgcggctggtggacacaggggacaagttccgcttcttcagcatggtgcgtgacctcatgctatggatggaggatgtcatccggcaaatcgaagcccaggagaagccaagggatgtgtcatctgttgaattattaatgaacaatcatcaaggtatcaaagctgaaattgatgcccgtaatgacagcttcacaacctgcattgaacttgggaaatccctgctggcaagaaagcactacgcatccgaggagatcaaggaaaagttactgcagttgacagaaaagagaaaagaaatgattgacaagtgggaagaccgatgggaatggttaagactgattttggaggtccatcagttctcaagggacgccagtgtggccgaggcttggctgctcggacaggagccatacctatccagcagagaaataggccagagtgtggacgaggtggagaagctcatcaagcgccatgaggcttttgaaaagtctgcagcaacctgggacgagaggttctctgccctggaaaggctgacgacgttggagttactggaagtgcgcagacagcaagaggaagaggagaggaagaggcggccgccttctcctgagccgagcacgagggcttccgaggaggccgagtcccagcagcagtgggatacttccaaaggagagcaagtttcccagaatggtttgccggctgaacagggatctccacggatggcagaaacggcagacacaagcgaaatggtcaacggtgctgccgaacagaggacgagctcgaaagagtccagccccatcccctcccccacctccgaccgcaaagccaagactgccctcccgccccagagtgccgccaccttgccagccagagcccaggagacgccttcggcccagatggaaggcttcctgaatcggaagcacgagtgggaggcccacaacaagaaagcctcaagcaggtcctggcacaatgtttattgtgtcataaataaccaagaaatgggtttctacaaagatgcaaagaccgctgcttccggaattccctaccacagcgaggtccctgtgagtttgaaagaagccgtctgtgaagtggcccttgattacaagaagaagaagcacgtgttcaagctcaggctaaatgatggcaatgagtacctcttccaagccaaagatgatgaggaaatgaacacatggatccaggccatctcctccgccatctcctccgataaatacgaggtgtctgccagcacccagagcacgccagcatctagccgggcacagaccttgcccaccagcgttgtcaccatcaccagcgagtccagtcccggcaagcgggaaaaggacaaagagaaagacaaagagaagcggttcagcatttttggcaaaaagaagtga

SEQ ID NO: 109 - DNA, 954 bp, Homo sapiens
atggggtatgatgtaacccgtttccagggggatgttgacgaagatcttatctgccctatttgcagtggagtcttggaggagccagtacaggcacctcattgtgaacatgctttctgcaacgcctgcatcacccagtggttctctcagcaacagacatgtccagtggaccgtagtgttgtgacggtcgcccatctgcgcccagtacctcggatcatgcggaacatgttgtcaaagctgcagattgcctgtgacaacgctgtgttcggctgtagtgccgttgtccggcttgacaacctcatgtctcacctcagcgactgtgagcacaacccgaagcggcctgtgacctgtgaacagggctgtggcctggagatgcccaaagatgagctgcccaaccataactgcattaagcacctgcgctcagtggtacagcagcagcagacacgcatcgcagagctggagaagacgtcagctgaacacaaacaccagctggcggagcagaagcgagacatccagctgctaaaggcatacatgcgtgcaatccgcagtgtcaaccccaaccttcagaacctggaggagacaattgaatacaacgagatcctagagtgggtgaactcccttcagccagcaagagtgacccgctggggagggatgatctcgactcctgatgctgtgctccaggctgtaatcaagcgctccctggtggagagtggctgtcctgcttctattgtcaacgagctgattgaaaatgcccacgagcgtagctggccccagggtctggccacactagagactagacagatgaaccgacgctactatgagaactacgtggccaagcgcatccctggcaagcaggctgttgtcgtgatggcctgtgagaaccagcacatgggggatgacatggtgcaagagccaggccttgtcatgatatttgcgcatggcgtggaagagatataa

SEQ ID NO: 110 - DNA, 741 bp, Homo sapiens
atgcggaacatgttgtcaaagctgcagattgcctgtgacaacgctgtgttcggctgtagtgccgttgtccggcttgacaacctcatgtctcacctcagcgactgtgagcacaacccgaagcggcctgtgacctgtgaacagggctgtggcctggagatgcccaaagatgagctgcccaaccataactgcattaagcacctgcgctcagtggtacagcagcagcagacacgcatcgcagagctggagaagacgtcagctgaacacaaacaccagctggcggagcagaagcgagacatccagctgctaaaggcatacatgcgtgcaatccgcagtgtcaaccccaaccttcagaacctggaggagacaattgaatacaacgagatcctagagtgggtgaactcccttcagccagcaagagtgacccgctggggagggatgatctcgactcctgatgctgtgctccaggctgtaatcaagcgctccctggtggagagtggctgtcctgcttctattgtcaacgagctgattgaaaatgcccacgagcgtagctggccccagggtctggccacactagagactagacagatgaaccgacgctactatgagaactacgtggccaagcgcatccctggcaagcaggctgttgtcgtgatggcctgtgagaaccagcacatgggggatgacatggtgcaagagccaggccttgtcatgatatttgcgcatggcgtggaagagatataa

SEQ ID NO: 111 - DNA, 954 bp, Mus musculus
atggggtatgatgtgacccgtttccagggggacgttgacgaggaccttatctgccctatttgcagtggagtcttggaggagccagtgcaggcgcctcattgtgagcatgccttctgcaacgcctgcatcacccaatggttctctcagcagcagacgtgtccggtagaccgtagcgttgtcacggttgcccacctgcgcccagtacctcggatcatgcggaacatgttgtcaaagctacagattgcctgtgacaacgctgtgtttggctgcagtgctgttgtcaggcttgacaacctcatgtcccacctcagtgactgtgagcacaacccgaagcggcctgtgacctgtgagcagggctgtggcctggagatgcccaaagatgaactgccaaaccacaattgcattaagcacctgcgctccgtggtccagcagcagcagtcgcgcattgcagagctggagaagacctcggctgaacacaagcaccagctggcagagcagaagcgagacattcagctgctgaaggcgtatatgcgagccatccgcagtgtcaaccccaaccttcagaacctggaggagacaatcgaatacaatgagatcctcgagtgggtgaactccctgcagccggcaagggtgacccgctgggggggcatgatctccactcctgatgctgtgctccaggctgtcatcaagcgctccctcgtggaaagtggctgcccggcctccatcgtcaacgagctgattgaaaatgcccatgaacgcagctggccccagggtctggccacactagagacaagacagatgaaccggcgctactatgagaactacgtggccaagcgcatccctggcaagcaggctgtagtggtgatggcctgtgagaaccagcacatgggggacgacatggtgcaggagccagggctcgtcatgatatttgcgcatggtgtggaggagatataa

SEQ ID NO: 112 - DNA, 741 bp, Pan troglodytes
atgcggaacatgttgtcaaagctgcagattgcctgtgacaacgctgtgtttggctgtagtgccgttgtccggcttgacaacctcatgtctcacctcagcgactgtgagcacaacccgaagcggcctgtgacctgtgaacagggctgtggcctggagatgcccaaagatgagctgcccaaccataactgcattaagcacctgcgctcagtggtacagcagcagcagacacgcatcgcagagctggagaagacgtcagctgaacacaaacaccagctggcggagcagaagcgagacatccagctgctaaaggcatacatgcgtgcaatccgcagtgtcaaccccaaccttcagaacctggaggagacaattgaatacaacgagatcctagagtgggtgaactcccttcagccagcaagagtgacccgctggggagggatgatctcgactcctgatgctgtgctccaggctgtaatcaagcgctccctggtggagagtggctgtcctgcttctattgtcaacgagctgattgaaaatgcccacgagcgtagctggccccagggtctggccacactagagactagacagatgaaccgacgctactatgagaactacgtggccaagcgcatccctggcaagcaggctgttgtcgtgatggcctgtgagaaccagcacatgggggatgacatggtgcaagagccaggccttgtcatgatatttgcgcatggcgtggaagagatatag

SEQ ID NO: 113 - DNA, 954 bp, Equus caballus
atggggtatgatgtaacccgtttccagggggatgttgacgaagaccttatctgtcctatttgcagtggagtcttggaggagccagtccaggcacctcattgcgagcatgctttctgcaacgcctgcatcacccagtggttctctcagcagcagacgtgtccggtggaccgtagtgttgtgacggttgcacacctgcgcccagtacctcggatcatgcggaacatgttgtcaaagctgcagattgcctgcgataacgctgtgtttggctgcagtgctgttgtccggcttgacaacctcatgtctcacctcagcgactgtgagcacaacccaaaacggcctgtgacctgtgaacagggctgcgggctggagatgcccaaagatgagctgccaaaccacaactgcatcaagcacctgcgctcagtggtacagcagcagcagacacgcatcgcagagctagagaagacatcagctgaacacaagcaccagctggcagagcagaagcgagacatccagctgctaaaggcatacatgcgtgcgatccgcagtgtcaaccccaaccttcagaacctggaggagacaattgaatacaacgagatcctagagtgggtgaactccctgcagccagcaagagtgacccgctggggagggatgatctcgaccccagatgctgtactccaggcggtaatcaagcgctccctggtggagagtggctgtcctgcctctatcgtcaacgagctgattgaaaatgcccatgagcgtagctggccccaaggtttggccacactagagacaagacagatgaaccggcgctactatgagaactacgtggccaagcgcatccctggcaagcaggctgttgttgtgatggcctgtgagaaccagcatatgggcgatgacatggtccaggagccggggcttgtcatgatatttgcgcacggtgtggaagagatttaa
